(19) United States
(12) Patent Application Publication
(10) Pub. No.: US 2006/0140972 A1
(43) Pub. Date: Jun. 29, 2006

(54) Staphylococcus saprophyticus nucleic acids and polypeptides

(75) Inventors: Richard A. Alm, Ashland, MA (US); Paul Manning, Berlin, MA (US); Kathleen MacCormack, North Chelmsford, MA (US); Robert E. McLaughlin, Hudson, MA (US)

Correspondence Address: ASTRAZENECA R&D BOSTON, 35 GATEHOUSE DRIVE, WALTHAM, MA, 02451-1215, US

(73) Assignee: AstraZeneca AB

(21) Appl. No.: 11/021,837

(22) Filed: Dec. 23, 2004

Related U.S. Application Data
(60) Provisional application No. 60/533,534, filed on Dec. 31, 2003.
(60) Provisional application No. 60/600,680, filed on Aug. 11, 2004.

(51) Int. Cl. C12Q 1/68; C07H 21/04; C12P 21/06; A61K 39/02; C12N 1/21; C07K 14/315

(52) U.S. Cl. 424/190.1; 435/6; 435/69.1; 435/252.3; 435/320.1; 530/350; 536/23.7

(57) ABSTRACT

Isolated nucleic acid molecules which encode proteins from Staphylococcus saprophyticus are described. The invention also provides antisense nucleic acid molecules, recombinant expression vectors containing nucleic acid molecules, and host cells into which the expression vectors have been introduced. The invention still further provides isolated proteins, mutated proteins, fusion proteins, antigenic peptides and methods for the treatment, prevention or detection of an S. saprophyticus-associated disease or disorder. Furthermore, the nucleic acid molecules and polypeptide molecules of the invention may be used for the identification of agents which modulate S. saprophyticus activity, e.g., a small molecules.

### CROSS-REFERENCE TO RELATED APPLICATIONS

[0001] This application is related to U.S. Provisional Application No. 60/533,534 filed Dec. 31, 2003 and U.S. Provisional Application No. 60/600,680, filed Aug. 11, 2004, which are incorporated herein by reference in its entirety.

### FIELD OF THE INVENTION

[0002] The invention relates to isolated nucleic acids and polypeptides derived from Staphylococcus saprophyticus that can be used as molecular targets for diagnostics, prophylaxis and treatment of pathological conditions, as well as materials and methods for the diagnosis, prevention, and treatment of pathological conditions resulting from bacterial infection. In particular, in these and in other regards, the invention relates to novel polynucleotides that encode polypeptides, as set forth in FIG. 1.

### BACKGROUND OF THE INVENTION

[0003] Coagulase-negative staphylococci (CoNS) are commensal organisms of human skin and urogenital mucosa and are the most frequently isolated bacteria from bloodstream infections in intensive care patients. They are major etiological agents of nosocomial bacteremia and can also colonize a variety of medical devices and a diagnostic challenge is to distinguish clinically significant CoNS from contaminant strains. Urinary tract infections are the second most common infectious presentations in community practice and Staphylococcus saprophyticus is the next most frequently encountered agent which causes acute urinary tract infections after Escherichia coli. While E. coli remains the predominant pathogen responsible for acute community-acquired uncomplicated urinary tract infections (approximately 80%), other uropathogens are becoming increasingly important. Since the late 1970s, S. saprophyticus has been recognized as a significant pathogen, responsible for 7% to 30% of acute uncomplicated urinary tract infections (Stamm et al., N Engl J Med. 329:1328-1334, 1993; Meers et al. J Clin Pathol 28:270-273, 1975; Gillespie et al., J Clin Pathol 31:348-350, 1978; Wallmark et al., J Infect Dis 138:791-797, 1978; Latham et al., JAMA 250:3063-3066, 1983; Jordan et al., J Infect Dis 142:510-515, 1980). S. saprophyticus is often isolated from the urine of female outpatients presenting with symptoms of acute urinary infections (Jordan et al., 1980 ibid; Svanborg et al., Infect Dis Clin N Am 11:513-529, 1997) and these symptoms can not be differentiated from infections caused by E. coli. The etiology of uncomplicated urinary tract infections has remained stable over the last quarter of a century, although, as in other community-acquired disease, there has been a perceptible increase in antimicrobial resistance in the pathogens that cause these infections making them more difficult to treat.

[0004] The etiology of complicated urinary tract infections is influenced by host factors that underlie the infection, such as age, diabetes, or catheterization. Consequently, these complicated infections have a more diverse etiology than their uncomplicated counterparts, with Staphylococcal species playing a less important role. In addition, infections caused by coagulase negative staphylococci (such as S. saprophyticus) are commonly associated with infections after instrumentation of the urinary tract, especially in pediatric populations (Schlager, Pediatr Drugs 3:219-227, 2001). There is some evidence that S. saprophyticus is the causative agent of chronic bacterial prostatitis in men (Bergman et al., 5:241-245, 1989), as well as the etiological agent of sexually transmitted urethritis (Goldenring,6:417-418, 1986). S. saprophyticus can be differentiated from other urinary coagulase-negative staphylococci (i.e. S. epidermidis) by several characteristics, including novobiocin resistance, aerobic growth requirements, carbohydrate utilization and urease production (Jordan et al., 1980 ibid). Classification of S. saprophyticus can be done using culture-based identification systems (Janda et al., J Clin Microbiol 32:2056-2059, 1994; von Baum et al., Eur J Clin Microbiol Infect Dis 17:849-852, 1998) or by a rapid PCR assay (Martineau et al., J Clin Microbiol 38:3280-3284, 2000), although correct diagnoses can still be challenging.

[0005] S. saprophyticus is proposed to adhere to uroepithelial cells by producing a number of surface-associated proteins, most notably Ssp, Sdrl and a hemagglutinin (Aas) (Gatermann et al., Zentralbl Bakteriol 278:258-274, 1993; Hell et al., Mol Microbiol 29:871-881, 1998; Gatermann et al., Infect Immun 60:1055-1060, 1992; Gatermann et al., Infect Immun 62:4556-4563, 1994; Sakinc et al., Int J Med Microbiol 291(suppl 32): V56, 2001). The hemagglutinin is responsible for binding to extracellular matrix proteins (e.g. fibronectin) and appears to be the major adhesion molecule and represents a new class of staphylococcal adhesions, while the newly identified Sdrl also binds extracellular matrix proteins. Ssp is a surface-associated fibrillar protein thought to be involved in the interaction of S. saprophyticus with uroepithelial cells. S. saprophyticus also produces a urease which contributes to cystopathogenicity and tissue invasiveness by inducing severe damage to the bladder tissue (Gatermann Infect Immun 57:110-116, 1989; Gatermann Infect Immun 57:2998-3002, 1989). The urease catalyzes the hydrolysis of urea in urine and causes the release of ammonia and CO₂. As a result, the urinary pH is elevated, which can eventually lead to the formation of bladder or kidney stones.

[0006] Management of uncomplicated urinary tract infections has been quite successful as the spectrum of organisms causing the infections is quite small, and the susceptibility of these organisms to antimicrobial agents has been predictable. As a result, empirical therapy with trimethoprim-sulfamethoxazole has been the standard approach for uncomplicated infections. However, resistance rates to this therapy now approach 20% in some countries and this has necessitated a change in therapy and fluoroquinolones are being used more commonly. As fluoroquinolone resistance rates increase, the concern is that management of uncomplicated urinary tract infections will become more difficult.

[0007] The genome size of S. saprophyticus is unknown, although it is estimated to be approximately 2.4 Mb based on the genome sizes of other Staphylococcus spp. There have been few molecular genetic studies on this increasingly important pathogen, as evidenced by the public GenBank database currently only having approximately 20 kb (0.85% of predicted genome size) of non-redundant DNA sequence specific to an isolate of S. saprophyticus.

### SUMMARY OF THE INVENTION

[0008] The invention provides novel nucleic acid molecules and polypeptides which have a variety of uses. The nucleic acid and polypeptide molecules of the invention can be used in a variety of methods, including for example, screening assays, diagnostic assays, methods of treatment (e.g., prophylactic and therapeutic), production of recombinant proteins, and generation of probes, primers, antibodies and antisense molecules. As described herein, an S. saprophyticus nucleic acid as detailed in FIG. 1 encodes a polypeptide having one or more of the activities as set forth in FIG. 1.

[0009] In an exemplary method, the isolated nucleic acid molecules or encoded polypeptides of the invention (or agents derived therefrom, for example, nucleic acid fragments, peptide fragments, peptidomimetics, antibodies etc.), can be used, for example, to screen for a candidate test compound or agent, e.g., a small molecule, which has a stimulatory or inhibitory effect on S. saprophyticus expression or S. saprophyticus activity, to screen for drugs or compounds which modulate S. saprophyticus activity, e.g., a small molecule, as well as to treat or prevent S. saprophyticus-associated diseases and disorders, preferably, urinary tract infections. The S. saprophyticus nucleic acid molecules of the present invention can be used to express S. saprophyticus polypeptides (e.g., via a recombinant expression vector in a host cell), to detect S. saprophyticus RNA (e.g., in a biological sample) or a genetic alteration in an S. saprophyticus gene, and to generate S. saprophyticus probes and primers to specifically identify S. saprophyticus or identify genes from other related bacterial species. In addition, the anti-S. saprophyticus antibodies of the invention can be used to detect and isolate S. saprophyticus polypeptides and to modulate S. saprophyticus polypeptide activity.

[0010] In one aspect, the invention features isolated nucleic acid molecules including nucleotide sequences within SEQ ID NO:1-57 as described in FIG. 1, which are predicted to encode particular polypeptides. The invention includes nucleotide sequences that are substantially identical (at least 50% homologous) to the nucleotide sequences which are detailed in FIG. 1. For example, with respect to SEQ ID NO: 1, the invention includes a nucleic acid sequence having nucleotides 835-1164 of SEQ ID NO:1, or fragments thereof. In another example, the invention includes a nucleic acid sequence having nucleotides 1205-1535 of SEQ ID NO: 1, or fragments thereof. The invention also features isolated nucleic acid molecules at least 15 contiguous nucleotides to the nucleotide sequence set forth in FIG. 1.

[0011] The invention further includes polypeptide sequences (at least 50% homologous) encoded by the nucleic acid sequences set forth in FIG. 1. For example, as set forth in FIG. 1, the nucleic acid sequence having nucleotides 4653-6590 of SEQ ID NO:48 encodes a polypeptide of a DNA gyrase subunit B. The amino acid sequence of this predicted protein, SEQ ID NO: 58, can be readily determined by one skilled in the art. The present invention also features nucleic acid molecules which encode fragments, for example, biologically active or antigenic fragments of the polypeptides of the present invention. In still other aspects, the invention features nucleic acid molecules that hybridize under stringent conditions to the isolated nucleic acid molecules described herein.

[0012] In another embodiment, the present invention provides vectors including the isolated nucleic acid molecules described herein (e.g., S. saprophyticus encoding nucleic acid molecules). Such vectors can optionally include nucleotide sequences encoding heterologous polypeptides. Also featured are host cells including such vectors (e.g., host cells including vectors suitable for producing S. saprophyticus nucleic acid molecules and polypeptides). A method of producing a polypeptide consisting of culturing the host cell in an appropriate culture medium to produce a polypeptide as described herein.

[0013] In a further aspect, the present invention features methods for detecting S. saprophyticus polypeptides and/or S. saprophyticus nucleic acid molecules, such methods featuring, for example, a probe, primer or antibody described herein. Also featured are kits for the detection of S. saprophyticus polypeptides and/or S. saprophyticus nucleic acid molecules. In addition, compositions, including vaccine compositions, and methods for the protection or treatment of infection by S. saprophyticus are within the scope of this invention.

[0014] In yet another aspect, the invention features methods for identifying compounds which bind to and/or modulate the activity of an S. saprophyticus polypeptide or S. saprophyticus nucleic acid molecule as described herein. Also featured are methods for modulating an S. saprophyticus nucleic acid or polypeptide activity. In a related aspect, the present invention provides a diagnostic method of assessing whether a patient is afflicted with a S. saprophyticus-associated disease or disorder. Moreover, the invention provides a diagnostic method of assessing whether a patient has an S. saprophyticus-associated disease or disorder.

[0015] Other features and advantages of the invention will be apparent from the following detailed description and claims.

### BRIEF DESCRIPTION OF THE FIGURES

[0016] FIG. 1 is a table detailing the nucleic acid sequences which encode particular polypeptides encompassed by the present invention.

### DETAILED DESCRIPTION OF THE INVENTION

[0017] The present invention is based upon the sequencing and analysis of the genome of Staphylococcus saprophyticus. The invention features isolated nucleic acid molecules including nucleotide sequences within SEQ ID NO:1-57 as described in FIG. 1, which encode particular polypeptides. FIG. 1 details the nucleic acid sequences of interest, for example, the invention includes nucleotides 835-1164 of SEQ ID NO:1 which encodes a conserved hypothetical protein and nucleotides 1205-1535 of SEQ ID NO:1 which encodes a O-succinylbenzoic acid-CoA ligase. The start and stop nucleotides corresponding to the first and last nucleotide base pairs of the coding sequence are also set forth in FIG. 1.

[0018] Accordingly, the invention provides nucleic acid and polypeptide molecules from S. saprophyticus, a facultative anaerobic, gram positive bacteria which has been identified as a major cause of urinary tract infections, in addition to other diseases and disorders. One aspect of the invention features nucleic acid molecules which are useful e.g., for production of recombinant proteins useful e.g., for screening for inhibitors, e.g., small molecules, which are useful as prophylactic or therapeutic agents to treat or prevent S. saprophyticus-associated diseases or disorders, e.g., a urinary tract infection. The polypeptides of the invention can be formulated for use in compositions e.g., vaccines, to induce immune responses to treat or prevent S. saprophyticus-associated diseases or disorders. Moreover, the nucleic acid or polypeptide molecules of the invention may also be used as diagnostic agents to identify S. saprophyticus, e.g., in a subject, to thereby diagnose whether the subject has or is at risk for an S. saprophyticus-associated disease or disorder, e.g., a urinary tract infection. The present invention also includes probes and primers, which may be used, for example, to identify S. saprophyticus or to identify related bacterial species. In addition, the invention includes antisense molecules based on the nucleic acid molecules of the invention. The present invention also includes antibodies, or fragments thereof, against polypeptides of the invention, or fragments thereof.

[0019] The polypeptides encoded by the nucleic acid sequences within SEQ ID NO:1-57 can be easily derived from FIG. 1 and can be readily determined by one skilled in the art. As noted above, the start and stop nucleotides corresponding to the first and last nucleotide base pairs of the coding sequence are set forth in FIG. 1 and one skilled in the art using the genetic code could predict the corresponding amino acid sequence.

[0020] Thus, using FIG. 1 one skilled in the art could determine the amino acid sequence of each of the polypeptides encoded by the sequences presented in FIG. 1. For example, the nucleic acid sequence having nucleotides 4653-6590 of SEQ ID NO:48 encodes a DNA gyrase subunit B polypeptide having the amino acid sequence of SEQ ID NO: 58. Similarly, from FIG. 1, the nucleic acid sequence having nucleotides 6629-9328 of SEQ ID NO:48 encodes a predicted DNA gyrase subunit A polypeptide having the amino acid sequence of SEQ ID NO: 59; the nucleic acid sequence of 17460-18770 of SEQ ID NO:53 encodes a predicted UDP-N-Aacerylmuramate-alanine ligase having the amino acid sequence of SEQ ID NO: 60; the nucleic acid sequence of 20792-2151 1 of SEQ ID NO:31 encodes a predicted polypeptide of uridylate kinase having the amino acid sequence of SEQ ID NO:61; the nucleic acid sequence of 5432-4182 of SEQ ID NO:26 encodes a predicted polypeptide of UDP-N-acetylglucosamine pyrophophorylase having the amino acid sequence of SEQ ID NO: 62; and the nucleic acid sequence of 219402-219911 of SEQ ID NO:53 encodes a predicted shikimate kinase having the amino acid sequence of SEQ ID NO: 62.

[0021] For each S. saprophyticus polypeptide of the invention, an identification number for a polypeptide from another Staphylococcus species, e.g., an S. epidermidis strain or an S. aurelius strain, which has the highest percent identity to the polypeptide of the invention is also listed in FIG. 1. The S. epidermidis strain from which polypeptides were identified for FIG. 1 is strain ATCC 12228 (Genbank Accession No. NC_{—}004461). The S. aurelius strain from which polypeptides were identified for FIG. 1 is strain N315 (Genbank Accession No. NC_{—}002745), and the S. aureliusNW2 strain from which polypeptides were identified for FIG. 1 is Genbank Accession No. NC_{—}003923.

[0022] The precent identity to a particular polypeptide of the invention to a known protein can be readily determined using FIG. 1. For example, a D-serine/D-alanine/glycine transporter was identified in SEQ ID NO:7 (Contig 19.02c). This polypeptide was identified to have 67.41% identity to S. epidermidis ID number SE1372.

[0023] The nucleotide and amino acid sequences of the S. epidermidis and S. aurelius genes and proteins listed in FIG. 1 are publicly available at, for example, the National Center for Biotechnology Information, PubMed website using the identification numbers listed in FIG. 1.

[0024] S. epidermidis and S. aurelius are facultative anaerobic, gram positive bacteria which are closely related to S. saprophyticus. Based on the similarity between S. epidermidis, S. aurelius and S. saprophyticus, the function of the polypeptides of the invention may be determined based on homology to closely related S. epidermidis and S. aurelius polypeptides.

[0025] An “S. saprophyticus-associated disease or disorder,” as used herein, includes any disease or disorder caused by or related to infection with S. saprophyticus. For example, an S. saprophyticus disease or disorder includes, but is not limited to, urinary tract infection (UTI; also referred to as cystitis), or symptoms associated therewith. Urinary tract infection is a common infection which is usually caused when bacteria, e.g., S. saprophyticus, enter the urethra and bladder and cause inflammation and infection. Kidney infection (pyelonephritis) may result from urinary tract infection.

[0026] An “open reading frame”, also referred to herein as ORF, is a region of nucleic acid which encodes a polypeptide. This region may represent a portion of a coding sequence or a total sequence and can be determined from a stop to stop codon or from a start to stop codon.

[0027] As used herein, a “coding sequence” is a nucleic acid which is transcribed into messenger RNA and/or translated into a polypeptide when placed under the control of appropriate regulatory sequences. The boundaries of the coding sequence are determined by a translation start codon at the five prime terminus and a translation stop code at the three prime terminus. A coding sequence can include but is not limited to RNA, e.g., messenger RNA, synthetic DNA, and recombinant nucleic acid sequences.

[0028] A “complement” of a nucleic acid as used herein refers to an anti-parallel or antisense sequence that participates in Watson-Crick base-pairing with the original sequence.

[0029] A “gene product” is a protein or structural RNA which is specifically encoded by a gene.

[0030] As used herein, the term “probe” refers to a nucleic acid, peptide or other chemical entity which specifically binds to a molecule of interest. Probes are often associated with or capable of associating with a label. A label is a chemical moiety capable of detection. Typical labels comprise dyes, radioisotopes, luminescent and chemiluminescent moieties, fluorophores, enzymes, precipitating agents, amplification sequences, and the like. Similarly, a nucleic acid, peptide or other chemical entity which specifically binds to a molecule of interest and immobilizes such molecule is referred herein as a “capture ligand”. Capture ligands are typically associated with or capable of associating with a support such as nitro-cellulose, glass, nylon membranes, beads, particles and the like. The specificity of hybridization is dependent on conditions such as the base pair composition of the nucleotides, and the temperature and salt concentration of the reaction. These conditions are readily discernable to one of ordinary skill in the art using routine experimentation.

[0031] The term “homologous” refers to the sequence similarity or sequence identity between two polypeptides or between two nucleic acid molecules. When a position in both of the two compared sequences is occupied by the same base or amino acid monomer subunit, e.g., if a position in each of two DNA molecules is occupied by adenine, then the molecules are homologous at that position. The percent of homology between two sequences is a function of the number of matching or homologous positions shared by the two sequences divided by the number of positions compared×100. For example, if 6 of 10 of the positions in two sequences are matched or homologous then the two sequences are 60% homologous. By way of example, the DNA sequences ATTGCC and TATGGC share 50% homology. Generally, a comparison is made when two sequences are aligned to give maximum homology.

[0032] The terms peptides, proteins, and polypeptides are used interchangeably herein.

[0033] A polypeptide has S. saprophyticus biological activity if it has one, two and preferably more of the following properties: (1) any activity related to or associated with the initiation or progression of infection or disease, e.g., in a subject; (2) if when expressed in the course of an S. saprophyticus infection, it can promote, or mediate the attachment of S. saprophyticus to a cell; (3) it has an enzymatic activity, structural or regulatory function characteristic of an S. saprophyticus protein; (4) the gene which encodes it can rescue a lethal mutation in an S. saprophyticus gene; (5) or it is immunogenic in a subject. A polypeptide has biological activity if it is an antagonist, agonist, or super-agonist of a polypeptide having one of the above-listed properties.

[0034] A biologically active fragment or polypeptide is one having an in vivo or in vitro activity which is characteristic of the S. saprophyticus polypeptides of the invention, or of other naturally occurring S. saprophyticus polypeptides, e.g., one or more of the biological activities described herein. Especially preferred are fragments which exist in vivo, e.g., fragments which arise from post transcriptional processing or which arise from translation of alternatively spliced RNA's. Fragments include those expressed in native or endogenous cells as well as those made in expression systems, e.g., in E. coli cells. Because peptides such as S. saprophyticus polypeptides often exhibit a range of physiological properties and because such properties may be attributable to different portions of the molecule, a useful S. saprophyticus fragment or S. saprophyticus analog is one which exhibits a biological activity in any biological assay for S. saprophyticus activity. Most preferably the fragment or analog possesses 10%, preferably 40%, more preferably 60%, 70%, 80% or 90% or greater of the activity of S. saprophyticus, in any in vivo or in vitro assay.

[0035] As used herein, the term “fragment”, as applied to an S. saprophyticus polypeptide, will ordinarily be at least about 10, 15, 20, 25, 30, 35, 40, 45, 50, 55, 60, 65, 70, 75, 80, 85, 90,95, 100, 110, 120, 130, 140, 150, 160, 170, 180, 190, 200, 210, 220, 230, 240, 250, 260, 270, 280, 290, 300, 310, 320, 330, 340, 350, 360, 370, 380, 390, 400, or more amino acids. Fragments of S. saprophyticus polypeptides can be generated by methods known to those skilled in the art. The ability of a candidate fragment to exhibit a biological activity of S. saprophyticus polypeptide can be assessed by methods known to those skilled in the art as described herein. Also included are S. saprophyticus polypeptides containing residues that are not required for biological activity of the peptide or that result from alternative mRNA splicing or alternative protein processing events.

[0036] An “immunogenic component” as used herein is a moiety, such as an S. saprophyticus polypeptide, analog or fragment thereof, that is capable of eliciting a humoral and/or cellular immune response in a host animal alone or in combination with an adjuvant or a live vaccine carrier strain.

[0037] An “antigenic component” as used herein is a moiety, such as an S. saprophyticus polypeptide, analog or fragment thereof, that is capable of binding to a specific antibody with sufficiently high affinity to form a detectable antigen-antibody complex.

[0038] As used herein, the term “transgene” means a nucleic acid (encoding, e.g., one or more polypeptides), which is partly or entirely heterologous, i.e., foreign, to the transgenic animal or cell into which it is introduced, or, is homologous to an endogenous gene of the transgenic animal or cell into which it is introduced, but which is designed to be inserted, or is inserted, into the cell's genome in such a way as to alter the genome of the cell into which it is inserted (e.g., it is inserted at a location which differs from that of the natural gene or its insertion results in a knockout). A transgene can include one or more transcriptional regulatory sequences and any other nucleic acid, such as introns, that may be necessary for optimal expression of the selected nucleic acid, all operably linked to the selected nucleic acid, and may include an enhancer sequence.

[0039] As used herein, the term “transgenic cell” refers to a cell containing a transgene.

[0040] As used herein, a “transgenic animal” is any animal in which one or more, and preferably essentially all, of the cells of the animal includes a transgene. The transgene can be introduced into the cell, directly or indirectly by introduction into a precursor of the cell, by way of deliberate genetic manipulation, such as by a process of transformation of competent cells or by microinjection or by infection with a recombinant virus. This molecule may be integrated within a chromosome, or it may be extrachromosomally replicating DNA.

[0041] The term “antibody” as used herein is intended to include fragments thereof which are specifically reactive with S. saprophyticus polypeptides.

[0042] As used herein, the term “cell-specific promoter” means a DNA sequence that serves as a promoter, i.e., regulates expression of a selected DNA sequence operably linked to the promoter, and which effects expression of the selected DNA sequence in specific cells of a tissue. The term also covers so-called “leaky” promoters, which regulate expression of a selected DNA primarily under certain conditions. The term also covers promoters which regulate expression of a selected DNA, during specific phases of infection.

[0043] Misexpression, as used herein, refers to a non-wild type pattern of gene expression. It includes: expression at non-wild type levels, i.e., over or under expression; a pattern of expression that differs from wild type in terms of the time or stage at which the gene is expressed, e.g., increased or decreased expression (as compared with wild type) at a predetermined infectious period or stage; a pattern of expression that differs from wild type in terms of decreased expression (as compared with wild type) in a predetermined host cell type; a pattern of expression that differs from wild type in terms of the splicing size, amino acid sequence, post-transitional modification, or biological activity of the expressed polypeptide; a pattern of expression that differs from wild type in terms of the effect of an environmental stimulus or extracellular stimulus on expression of the gene, e.g., a pattern of increased or decreased expression (as compared with wild type) in the presence of an increase or decrease in the strength of the stimulus.

[0044] As used herein, “host cells” and other such terms denoting microorganisms or higher eukaryotic cell lines cultured as unicellular entities refers to cells which can become or have been used as recipients for a recombinant vector or other transfer DNA, and include the progeny of the original cell which has been introduced. It is understood by individuals skilled in the art that the progeny of a single parental cell may not necessarily be completely identical in genomic or total DNA compliment to the original parent, due to accident or deliberate mutation.

[0045] As used herein, the term “control sequence” refers to a nucleic acid having a base sequence which is recognized by the host organism to effect the expression of encoded sequences to which they are ligated. The nature of such control sequences differs depending upon the host organism; in prokaryotes, such control sequences generally include a promoter, ribosomal binding site, terminators, and in some cases operators; in eukaryotes, generally such control sequences include promoters, terminators and in some instances, enhancers. The term control sequence is intended to include at a minimum, all components whose presence is necessary for expression, and may also include additional components whose presence is advantageous, for example, leader sequences.

[0046] As used herein, the term “operably linked” refers to sequences joined or ligated to function in their intended manner. For example, a control sequence is operably linked to coding sequence by ligation in such a way that expression of the coding sequence is achieved under conditions compatible with the control sequence and host cell.

[0047] The metabolism of a substance, as used herein, means any aspect of the, expression, function, action, or regulation of the substance. The metabolism of a substance includes modifications, e.g., covalent or non-covalent modifications of the substance. The metabolism of a substance includes modifications, e.g., covalent or non-covalent modification, the substance induces in other substances. The metabolism of a substance also includes changes in the distribution of the substance. The metabolism of a substance includes changes the substance induces in the distribution of other substances.

[0048] A “sample” as used herein refers to a biological sample, such as, for example, tissue or fluid isolated from an individual (including without limitation plasma, serum, cerebrospinal fluid, lymph, tears, saliva, cells, urine, and tissue sections) or from in vitro cell culture constituents, as well as samples from the environment.

[0049] As used herein, the term “treatment” or “treating” is defined as the application or administration of a therapeutic agent to a patient, or application or administration of a therapeutic agent to an isolated tissue or cell line from a patient, who has a disease or disorder, a symptom of disease or disorder or a predisposition toward a disease or disorder, with the purpose to cure, heal, alleviate, relieve, alter, remedy, ameliorate, improve or affect the disease or disorder, the symptoms of the disease or disorder, or the predisposition toward disease. In one embodiment, the disease or disorder is treated by the inhibition or elimination of infection, e.g., a S. saprophyticus infection by an agent with inhibits S. saprophyticus nucleic acid expression or polypeptide activity, inhibits S. saprophyticus growth, or kills S. saprophyticus bacterial cells, e.g., in a subject.

[0050] The practice of the invention will employ, unless otherwise indicated, conventional techniques of chemistry, molecular biology, microbiology, recombinant DNA, and immunology, which are within the skill of the art. Such techniques are explained fully in the literature. See e.g., Sambrook, Fritsch, and Maniatis, Molecular Cloning; Laboratory Manual 2nd ed. (1989); DNA Cloning, Volumes I and II (D. N Glover ed. 1985); Oligonucleotide Synthesis (M. J. Gait ed, 1984); Nucleic Acid Hybridization (B. D. Hames & S. J. Higgins eds. 1984); the series, Methods in Enzymoloqy (Academic Press, Inc.), particularly Vol. 154 and Vol. 155 (Wu and Grossman, eds.) and PCR-A Practical Approach (McPherson, Quirke, and Taylor, eds., 1991).

[0051] Aspects of the invention are further explicated below.

I. Isolated Nucleic Acid Molecules

[0052] One aspect of the invention pertains to isolated nucleic acid molecules that encode polypeptides of the invention or biologically active portions thereof, as well as nucleic acid fragments sufficient for use as hybridization probes or primers for the identification or amplification of the nucleic acids of the invention or related nucleic acids. As used herein, the term “nucleic acid molecule” is intended to include DNA molecules (e.g., cDNA or genomic DNA) and RNA molecules (e.g., mRNA) and analogs of the DNA or RNA generated using nucleotide analogs. This term also encompasses untranslated sequence located at both the 3′ and 5′ ends of the coding region of the gene: at least about 100 nucleotides of sequence upstream from the 5′ end of the coding region and at least about 20 nucleotides of sequence downstream from the 3′ end of the coding region of the gene. The nucleic acid molecule can be single-stranded or double-stranded, but preferably is double-stranded DNA. An “isolated” nucleic acid molecule is one which is separated from other nucleic acid molecules which are present in the natural source of the nucleic acid. Preferably, an “isolated” nucleic acid is free of sequences which naturally flank the nucleic acid (i.e., sequences located at the 5′ and 3′ ends of the nucleic acid) in the genomic DNA of the organism from which the nucleic acid is derived. For example, in various embodiments, the isolated nucleic acid molecule can contain less than about 5 kb, 4 kb, 3 kb, 2 kb, 1 kb, 0.5 kb or 0.1 kb of nucleotide sequences which naturally flank the nucleic acid molecule in genomic DNA of the cell from which the nucleic acid is derived (e.g, an S. saprophyticus cell). Moreover, an “isolated” nucleic acid molecule, such as a DNA molecule, can be substantially free of other cellular material, or culture medium when produced by recombinant techniques, or chemical precursors or other chemicals when chemically synthesized.

[0053] A nucleic acid molecule of the present invention, e.g., a nucleic acid molecule having a nucleotide sequence as described in FIG. 1, or a portion thereof, can be isolated using standard molecular biology techniques and the sequence information provided herein. For example, an S. saprophyticus DNA can be isolated from an S. saprophyticus library using all or portion of one of the sequences of FIG. 1 as a hybridization probe and standard hybridization techniques (e.g., as described in Sambrook, J., Fritsh, E. F., and Maniatis, T. Molecular Cloning: A Laboratory Manual. 2nd, ed., Cold Spring Harbor Laboratory, Cold Spring Harbor Laboratory Press, Cold Spring Harbor, N.Y., 1989). Moreover, a nucleic acid molecule encompassing all or a portion of one of the sequences of FIG. 1 can be isolated by the polymerase chain reaction using oligonucleotide primers designed based upon this sequence (e.g., a nucleic acid molecule encompassing all or a portion of one of the sequences of FIG. 1 can be isolated by the polymerase chain reaction using oligonucleotide primers designed based upon this same sequence of FIG. 1). For example, mRNA can be isolated from normal bacterial cells (e.g., by the guanidinium-thiocyanate extraction procedure of Chirgwin et al. (1979) Biochemistry 18: 5294-5299) and DNA can be prepared using reverse transcriptase (e.g., Moloney MLV reverse transcriptase, available from Gibco/BRL, Bethesda, MD; or AMV reverse transcriptase, available from Seikagaku America, Inc., St. Petersburg, Fla.). Synthetic oligonucleotide primers for polymerase chain reaction amplification can be designed based upon one of the nucleotide sequences shown in FIG. 1. A nucleic acid of the invention can be amplified using cDNA or, alternatively, genomic DNA, as a template and appropriate oligonucleotide primers according to standard PCR amplification techniques. The nucleic acid so amplified can be cloned into an appropriate vector and characterized by DNA sequence analysis. Furthermore, oligonucleotides corresponding to a nucleotide sequence can be prepared by standard synthetic techniques, e.g., using an automated DNA synthesizer.

[0054] In a preferred embodiment, an isolated nucleic acid molecule of the invention comprises one of the nucleotide sequences shown in FIG. 1. The sequences of FIG. 1 correspond to the S. saphrophyticus DNAs of the invention. This DNA comprises sequences encoding proteins (i.e., the “coding region”, indicated in FIG. 1 for each encoded polypeptide), as well as 5′ untranslated sequences and 3′ untranslated sequences. Alternatively, the nucleic acid molecule can comprise only the coding region of any of the sequences in FIG. 1.

[0055] In another preferred embodiment, an isolated nucleic acid molecule of the invention comprises a nucleic acid molecule which is a complement of one of the nucleotide sequences shown in FIG. 1, or a portion thereof. A nucleic acid molecule which is complementary to one of the nucleotide sequences shown in FIG. 1 is one which is sufficiently complementary to one of the nucleotide sequences shown in FIG. 1 such that it can hybridize to one of the nucleotide sequences shown in FIG. 1, thereby forming a stable duplex.

[0056] In still another preferred embodiment, an isolated nucleic acid molecule of the invention comprises a nucleotide sequence which is at least about 50%, 51%, 52%, 53%, 54%, 55%, 56%, 57%, 58%, 59%, or 60%, preferably at least about 61%, 62%, 63%, 64%, 65%, 66%, 67%, 68%, 69%, or 70%%, more preferably at least about 71%, 72%, 73%, 74%, 75%, 76%, 77%, 78%, 79%, or 80%, 81%, 82%, 83%, 84%, 85%, 86%, 87%, 88%, 89%, or 90%, or 91%, 92%, 93%, 94%, and even more preferably at least about 95%, 96%, 97%, 98%, 99% or more homologous to a nucleotide sequence shown in FIG. 1, or a portion thereof.

[0057] As used herein, ranges and identity values intermediate to the above-recited ranges, (e.g., 70-90% identical or 80-95% identical) are also intended to be encompassed by the present invention. For example, ranges of identity values using a combination of any of the above values recited as upper and/or lower limits are intended to be included. In an additional preferred embodiment, an isolated nucleic acid molecule of the invention comprises a nucleotide sequence which hybridizes, e.g., hybridizes under stringent conditions, to one of the nucleotide sequences shown in FIG. 1, or a fragment thereof.

[0058] Moreover, the nucleic acid molecule of the invention can comprise only a portion of the coding region or the non-coding region of one of the sequences in FIG. 1, for example a fragment which can be used as a probe or primer or a fragment encoding a biologically active portion of a protein of the invention.

[0059] Nucleic acids isolated or synthesized in accordance with features of the present invention are useful, by way of example, without limitation, as probes, primers, capture ligands, antisense genes and for developing expression systems for the synthesis of proteins and peptides corresponding to such sequences. As probes, primers, capture ligands and antisense agents, the nucleic acid normally consists of all or part of the nucleic acids of the invention contained in FIG. 1. Probes and primers may be used, for example, identifying and/or cloning homologues in other cell types and organisms, as well as homologues from other Staphylococcus or related species.

[0060] A probe/primer typically comprises substantially purified oligonucleotide. The oligonucleotide typically comprises a region of nucleotide sequence that hybridizes under stringent conditions to at least about 12, 15, 16, 17, 18, 19, 20, 21, 22, 23, 24, preferably about 25, 26, 27, 28, 29, 30, 31, 32, 33, 34, 35, 36, 37, 38, 39, more preferably about 40, 50 or 75 consecutive nucleotides of a sense strand of one of the sequences set forth in FIG. 1, an anti-sense sequence of one of the sequences set forth in FIG. 1, or naturally occurring mutants thereof. Primers based on a nucleotide sequence of FIG. 1 can be used in PCR reactions to clone homologues. Probes based on the nucleotide sequences can be used to detect transcripts or genomic sequences encoding the same or homologous proteins. In preferred embodiments, the probe further comprises a label group attached thereto, e.g. the label group can be a radioisotope, a fluorescent compound, an enzyme, or an enzyme co-factor. Such probes can be used as a part of a diagnostic test kit for identifying cells which misexpress a protein, such as by measuring a level of a Staphylococcus polypeptide encoding nucleic acid in a sample of cells from a subject.

[0061] In one embodiment, the nucleic acid molecule of the invention encodes a protein or portion thereof which includes an amino acid sequence which is sufficiently homologous to an amino acid sequence encoded by the nucleic acid sequences of FIG. 1 such that the protein or portion thereof maintains activity. As used herein, the language “sufficiently homologous” refers to proteins or portions thereof which have amino acid sequences which include a minimum number of identical or equivalent amino acid residues to an amino acid sequence encoded by the nucleic acid sequences of FIG. 1 such that the protein or portion thereof is able to maintain an S. saprophyticus polypeptide activity. Examples of such activities are also described herein. Thus, “S. saprophyticus polypeptide activity” includes activities as set forth in FIG. 1 or which has one, two and preferably more of the following properties: ((1) any activity related to or associated with the initiation or progression of infection or disease, e.g., in a subject; (2) if when expressed in the course of an S. saprophyticus infection, it can promote, or mediate the attachment of S. saprophyticus to a cell; (3) it has an enzymatic activity, structural or regulatory function characteristic of an S. saprophyticus protein; (4) the gene which encodes it can rescue a lethal mutation in an S. saprophyticus gene; (5) or it is immunogenic in a subject. A polypeptide has biological activity if it is an antagonist, agonist, or super-agonist of a polypeptide having one of the above-listed properties.

[0062] In another embodiment, the protein is at least about 50%, 55, 60%, 65%, 70%, 75%, 80%, 85%, 90%, 91%, 92%, 93%, 94%, 95%, 96%, 97%, 98%, 99% or more homologous to an entire amino acid sequence encoded by the nucleic acid sequences of FIG. 1.

[0063] Portions of proteins encoded by the nucleic acid molecules of the invention are preferably biologically active portions of one of the proteins. As used herein, the term “biologically active portion of a protein” is intended to include a portion, e.g., a domain/motif, of a protein that retains an S. saprophyticus biological activity or has an activity as set forth in FIG. 1. To determine whether a protein or a biologically active portion thereof can retain an S. saprophyticus biological an assay for the specific biological activity may be performed. Additional nucleic acid fragments encoding biologically active portions of a protein can be prepared by isolating a portion of one of the sequences in FIG. 1, expressing the encoded portion of the protein or peptide (e.g., by recombinant expression in vitro) and assessing the activity of the encoded portion of the protein or peptide.

[0064] The invention further encompasses nucleic acid molecules that differ from one of the nucleotide sequences shown in FIG. 1 (and fragments thereof) due to degeneracy of the genetic code and thus encode the same protein as that encoded by the nucleotide sequences shown in FIG. 1. In another embodiment, an isolated nucleic acid molecule of the invention has a nucleotide sequence encoding a protein having an amino acid sequence shown in FIG. 1. In a still further embodiment, the nucleic acid molecule of the invention encodes a full length S. saprophyticus protein which is substantially homologous to an amino acid sequence encoded by the nucleic acid sequences of FIG. 1 (encoded by an open reading frame of a nucleotide sequence shown in FIG. 1).

[0065] It will be understood by one of ordinary skill in the art that in one embodiment the sequences of the invention are not meant to include the sequences of the prior art. In one embodiment, the invention includes nucleotide and amino acid sequences having a percent identity to a nucleotide or amino acid sequence of the invention which is greater than that of a sequence of the prior art. One of ordinary skill in the art would be able to calculate the lower threshold of percent identity for any given sequence of the invention by examining the GAP-calculated percent identity scores set forth in FIG. 1 for a hit for the given sequence, and by subtracting the highest GAP-calculated percent identity from 100 percent. One of ordinary skill in the art will also appreciate that nucleic acid and amino acid sequences having percent identities greater than the lower threshold so calculated (e.g., at least 50%, 51%, 52%, 53%, 54%, 55%, 56%, 57%, 58%, 59%, or 60%, preferably at least about 61%, 62%, 63%, 64%, 65%, 66%, 67%, 68%, 69%, or 70%, more preferably at least about 71%, 72%, 73%, 74%, 75%, 76%, 77%, 78%, 79%, or 80%, 81%, 82%, 83%, 84%, 85%, 86%, 87%, 88%, 89%, or 90%, or 91%, 92%, 93%, 94%, and even more preferably at least about 95%, 96%, 97%, 98%, 99% or more identical) are also encompassed by the invention.

[0066] In addition to the S. saprophyticus nucleotide sequences shown in FIG. 1, it will be appreciated by one of ordinary skill in the art that DNA sequence polymorphisms that lead to changes in the amino acid sequences of proteins may exist within a population (e.g., the S. saprophyticus population). Such genetic polymorphism in the gene may exist among a strain within a population due to natural variation. As used herein, the terms “gene” and “recombinant gene” refer to nucleic acid molecules comprising an open reading frame encoding a protein, preferably an S. saprophyticus protein. Such natural variations can typically result in 1-10% variance in the nucleotide sequence of the gene. Any and all such nucleotide variations and resulting amino acid polymorphisms in that are the result of natural variation and that do not alter the functional activity of proteins are intended to be within the scope of the invention.

[0067] Nucleic acid molecules corresponding to natural variants and non-S. saprophyticus homologues of the S. saprophyticus DNA of the invention can be isolated based on their homology to the S. saprophyticus nucleic acid disclosed herein using the S. saprophyticus DNA, or a fragment thereof, as a hybridization probe according to standard hybridization techniques under stringent hybridization conditions. Accordingly, in another embodiment, an isolated nucleic acid molecule of the invention is at least 15, 20, 25, 30 ,35, 40 ,45, 50, 55, 60, 65, 70, 75, 80, 85, 90, 95, 100, 105, 110, 115, 120, 125, 130, 135, 140, 145, 150, 155, 160, 165, 170, 175, 180, 185, 190, 195, 200, 205, 210, 215, 220, 225, 230, 235, 240, 245, 250 or more nucleotides in length and hybridizes under stringent conditions to the nucleic acid molecule comprising a nucleotide sequence of FIG. 1. In other embodiments, the nucleic acid is at least 30, 40, 50, 60, 70, 80, 90, 100, 110, 120, 130, 140, 150, 160, 170, 180, 190, 200, 210, 220, 230, 240, 250 or more nucleotides in length.

[0068] As used herein, the term “hybridizes under stringent conditions” is intended to describe conditions for hybridization and washing under which nucleotide sequences that are significantly identical or homologous to each other remain hybridized to each other. Preferably, the conditions are such that sequences at least about 70%, more preferably at least about 80%, even more preferably at least about 85% or 90% identical to each other remain hybridized to each other. Such stringent conditions are known to those skilled in the art and can be found in Current Protocols in Molecular Biology, Ausubel et al., eds., John Wiley & Sons, Inc. (1995), sections 2, 4 and 6. Additional stringent conditions can be found in Molecular Cloning: A Laboratory Manual, Sambrook et al., Cold Spring Harbor Press, Cold Spring Harbor, N.Y. (1989), chapters 7, 9 and 11. A preferred, non-limiting example of stringent hybridization conditions includes hybridization in 4× sodium chloride/sodium citrate (SSC), at about 65-70° C. (or hybridization in 4× SSC plus 50% formamide at about 42-50° C.) followed by one or more washes in 1× SSC, at about 65-70° C. A preferred, non-limiting example of highly stringent hybridization conditions includes hybridization in 1× SSC, at about 65-70° C. (or hybridization in 1× SSC plus 50% formamide at about 42-50° C.) followed by one or more washes in 0.3× SSC, at about 65-70° C. A preferred, non-limiting example of reduced stringency hybridization conditions includes hybridization in 4× SSC, at about 50-60° C. (or alternatively hybridization in 6× SSC plus 50% formamide at about 40-45° C.) followed by one or more washes in 2× SSC, at about 50-60° C. Ranges intermediate to the above-recited values, e.g., at 65-70° C. or at 42-50° C. are also intended to be encompassed by the present invention. SSPE (1×SSPE is 0.15M NaCl, 10 mM NaH₂PO₄, and 1.25mM EDTA, pH 7.4) can be substituted for SSC (1×SSC is 0.15M NaCl and 15mM sodium citrate) in the hybridization and wash buffers; washes are performed for 15 minutes each after hybridization is complete. The hybridization temperature for hybrids anticipated to be less than 50 base pairs in length should be 5-10° C. less than the melting temperature (Tₘ) of the hybrid, where Tₘ is determined according to the following equations. For hybrids less than 18 base pairs in length, Tₘ(°C.)=2(# of A+T bases)+4(# of G+C bases). For hybrids between 18 and 49 base pairs in length, Tₘ(°C.)=81.5 +16.6(log₁₀[Na⁺])+0.41(%G+C)−(600/N), where N is the number of bases in the hybrid, and [Na⁺] is the concentration of sodium ions in the hybridization buffer ([Na⁺] for 1×SSC=0.165 M). It will also be recognized by the skilled practitioner that additional reagents may be added to hybridization and/or wash buffers to decrease non-specific hybridization of nucleic acid molecules to membranes, for example, nitrocellulose or nylon membranes, including but not limited to blocking agents (e.g., BSA or salmon or herring sperm carrier DNA), detergents (e.g., SDS), chelating agents (e.g., EDTA), Ficoll, PVP and the like. When using nylon membranes, in particular, an additional preferred, non-limiting example of stringent hybridization conditions is hybridization in 0.25-0.5M NaH₂PO₄, 7% SDS at about 65° C., followed by one or more washes at 0.02M NaH₂PO₄, 1% SDS at 65° C., see e.g., Church and Gilbert (1984) Proc. Natl. Acad. Sci. USA 81:1991-1995, (or alternatively 0.2× SSC, 1% SDS).

[0069] In addition to naturally-occurring variants of the sequence that may exist in the population, one of ordinary skill in the art will further appreciate that changes can be introduced by mutation into a nucleotide sequence of FIG. 1, thereby leading to changes in the amino acid sequence of the encoded protein, without altering the functional ability of the protein. For example, nucleotide substitutions leading to amino acid substitutions at “non-essential” amino acid residues can be made in a sequence of FIG. 1. A “non-essential” amino acid residue is a residue that can be altered from the wild-type sequence of one of the proteins (FIG. 1) without altering the activity of said protein, whereas an “essential” amino acid residue is required for protein activity. Other amino acid residues, however, (e.g., those that are not conserved or only semi-conserved in the domain having activity) may not be essential for activity and thus are likely to be amenable to alteration without altering activity.

[0070] Accordingly, another aspect of the invention pertains to nucleic acid molecules encoding proteins that contain changes in amino acid residues that are not essential for activity. Such proteins differ in amino acid sequence from a sequence contained in FIG. 1 yet retain at least one of the activities described herein. In one embodiment, the isolated nucleic acid molecule comprises a nucleotide sequence encoding a protein of the invention, wherein the protein comprises an amino acid sequence at least about 50% homologous to an amino acid sequence encoded by the nucleic acid sequences of FIG. 1 and is capable of retaining an S. saprophyticus biological activity, or has one or more activities set forth in FIG. 1. Preferably, the protein encoded by the nucleic acid molecule is at least about 50,%, 51 %, 52%, 53%, 54%, 55%, 56%, 57%, 58%, 59%, 60% homologous to one of the sequences in FIG. 1, more preferably at least about 60%, 61%, 62%, 63%, 64%, 65%, 66%, 67%, 68%, 69%, 70% homologous to one of the sequences in FIG. 1, even more preferably at least about 70%, 75%, 80%, 85%, 90%, 95% homologous to one of the sequences in FIG. 1, and most preferably at least about 96%, 97%, 98%, or 99% homologous to one of the sequences in FIG. 1.

[0071] In another embodiment, the present invention includes S. saprophyticus polypeptides which have been mutated, e.g., by a change in the nucleotide sequence encoding the polypeptide, which leads to change in the activity of the polypeptide or a modulation of drug resistance by the bacteria, e.g., wherein the change renders the bacteria partially or completely resistant to treatment with a particular compound.

[0072] To determine the percent homology of two amino acid sequences (e.g., one of the sequences of FIG. 1 and a mutant form thereof) or of two nucleic acids, the sequences are aligned for optimal comparison purposes (e.g., gaps can be introduced in the sequence of one protein or nucleic acid for optimal alignment with the other protein or nucleic acid). The amino acid residues or nucleotides at corresponding amino acid positions or nucleotide positions are then compared. When a position in one sequence (e.g., one of the sequences of FIG. 1) is occupied by the same amino acid residue or nucleotide as the corresponding position in the other sequence (e.g., a mutant form of the sequence selected from FIG. 1), then the molecules are homologous at that position (i.e., as used herein amino acid or nucleic acid “homology” is equivalent to amino acid or nucleic acid “identity”). The percent homology between the two sequences is a function of the number of identical positions shared by the sequences (i.e., % homology=# of identical positions/total # of positions×100).

[0073] An isolated nucleic acid molecule encoding a protein homologous to a protein sequence of FIG. 1 can be created by introducing one or more nucleotide substitutions, additions or deletions into a nucleotide sequence of FIG. 1 such that one or more amino acid substitutions, additions or deletions are introduced into the encoded protein. Mutations can be introduced into one of the sequences of FIG. 1 by standard techniques, such as site-directed mutagenesis and PCR-mediated mutagenesis. Preferably, conservative amino acid substitutions are made at one or more predicted non-essential amino acid residues. A “conservative amino acid substitution” is one in which the amino acid residue is replaced with an amino acid residue having a similar side chain. Families of amino acid residues having similar side chains have been defined in the art. These families include amino acids with basic side chains (e.g., lysine, arginine, histidine), acidic side chains (e.g., aspartic acid, glutamic acid), uncharged polar side chains (e.g., glycine, asparagine, glutamine, serine, threonine, tyrosine, cysteine), nonpolar side chains (e.g., alanine, valine, leucine, isoleucine, proline, phenylalanine, methionine, tryptophan), beta-branched side chains (e.g., threonine, valine, isoleucine) and aromatic side chains (e.g., tyrosine, phenylalanine, tryptophan, histidine). Thus, a predicted nonessential amino acid residue in a protein is preferably replaced with another amino acid residue from the same side chain family. Alternatively, in another embodiment, mutations can be introduced randomly along all or part of a coding sequence, such as by saturation mutagenesis, and the resultant mutants can be screened for an activity described herein to identify mutants that retain activity. Following mutagenesis of one of the sequences of FIG. 1, the encoded protein can be expressed recombinantly and the activity of the protein can be determined using, for example, assays described herein.

[0074] In addition to the nucleic acid molecules encoding proteins described above, another aspect of the invention pertains to isolated nucleic acid molecules which are antisense thereto. Nucleic acid or nucleic acid-hybridizing derivatives isolated or synthesized in accordance with the sequences described herein have utility as antisense agents to prevent the expression of S. saprophyticus genes. These sequences also have utility as antisense agents to prevent expression of genes of other Staphylococcus species.

[0075] An “antisense” nucleic acid comprises a nucleotide sequence which is complementary to a “sense” nucleic acid encoding a protein, e.g., complementary to the coding strand of a double-stranded DNA molecule or complementary to an mRNA sequence. Accordingly, an antisense nucleic acid can hydrogen bond to a sense nucleic acid. The antisense nucleic acid can be complementary to an entire coding strand, or to only a portion thereof. In one embodiment, an antisense nucleic acid molecule is antisense to a coding region of the coding strand of a nucleotide sequence encoding a protein. In another embodiment, the antisense nucleic acid molecule is antisense to a “noncoding region” of the coding strand of a nucleotide sequence encoding. The term “noncoding region” refers to 5′ and 3′ sequences which flank the coding region that are not translated into amino acids (i.e., also referred to as 5′ and 3′ untranslated regions).

[0076] Given the coding strand sequences encoding polypeptides disclosed herein (e.g., the sequences set forth in FIG. 1), antisense nucleic acids of the invention can be designed according to the rules of Watson and Crick base pairing. The antisense nucleic acid molecule can be complementary to the entire coding region of mRNA, but more preferably is an oligonucleotide which is antisense to only a portion of the coding or noncoding region of mRNA. For example, the antisense oligonucleotide can be complementary to the region surrounding the translation start site of mRNA. An antisense oligonucleotide can be, for example, about 5, 10, 15, 20, 25, 30, 35, 40, 45 or 50 nucleotides in length. An antisense nucleic acid of the invention can be constructed using chemical synthesis and enzymatic ligation reactions using procedures known in the art. For example, an antisense nucleic acid (e.g., an antisense oligonucleotide) can be chemically synthesized using naturally occurring nucleotides or variously modified nucleotides designed to increase the biological stability of the molecules or to increase the physical stability of the duplex formed between the antisense and sense nucleic acids, e.g., phosphorothioate derivatives and acridine substituted nucleotides can be used. Examples of modified nucleotides which can be used to generate the antisense nucleic acid include 5-fluorouracil, 5-bromouracil, 5-chlorouracil, 5-iodouracil, hypoxanthine, xanthine, 4-acetylcytosine, 5-(carboxyhydroxylmethyl)uracil, 5-carboxymethylaminomethyl-2-thiouridine, 5-carboxymethylaminomethyluracil, dihydrouracil, beta-D-galactosylqueosine, inosine, N6-isopentenyladenine, 1-methylguanine, 1-methylinosine, 2,2-dimethylguanine, 2-methyladenine, 2-methylguanine, 3-methylcytosine, 5-methylcytosine, N6-adenine, 7-methylguanine, 5-methylaminomethyluracil, 5-methoxyaminomethyl-2-thiouracil, beta-D-mannosylqueosine, 5′-methoxycarboxymethyluracil, 5-methoxyuracil, 2-methylthio-N6-isopentenyladenine, uracil-5-oxyacetic acid (v), wybutoxosine, pseudouracil, queosine, 2-thiocytosine, 5-methyl-2-thiouracil, 2-thiouracil, 4-thiouracil, 5-methyluracil, uracil-5-oxyacetic acid methylester, uracil-5-oxyacetic acid (v), 5-methyl-2-thiouracil, 3-(3-amino-3-N-2-carboxypropyl)uracil, (acp3)w, and 2,6-diaminopurine. Alternatively, the antisense nucleic acid can be produced biologically using an expression vector into which a nucleic acid has been subcloned in an antisense orientation (i.e., RNA transcribed from the inserted nucleic acid will be of an antisense orientation to a target nucleic acid of interest, described further in the following subsection).

[0077] The antisense nucleic acid molecules of the invention are typically administered to a cell or generated in situ such that they hybridize with or bind to cellular mRNA and/or genomic DNA encoding a protein of the invention to thereby inhibit expression of the protein, e.g., by inhibiting transcription and/or translation. The hybridization can be by conventional nucleotide complementarity to form a stable duplex, or, for example, in the case of an antisense nucleic acid molecule which binds to DNA duplexes, through specific interactions in the major groove of the double helix. The antisense molecule can be modified such that it specifically binds to a receptor or an antigen expressed on a selected cell surface, e.g., by linking the antisense nucleic acid molecule to a peptide or an antibody which binds to a cell surface receptor or antigen. The antisense nucleic acid molecule can also be delivered to cells using the vectors described herein. To achieve sufficient intracellular concentrations of the antisense molecules, vector constructs in which the antisense nucleic acid molecule is placed under the control of a strong prokaryotic, viral, or eukaryotic promoter are preferred.

[0078] In yet another embodiment, the antisense nucleic acid molecule of the invention is an α-anomeric nucleic acid molecule. An α-anomeric nucleic acid molecule forms specific double-stranded hybrids with complementary RNA in which, contrary to the usual β-units, the strands run parallel to each other (Gaultier et al. (1987) Nucleic Acids. Res. 15:6625-6641). The antisense nucleic acid molecule can also comprise a 2′-o-methylribonucleotide (Inoue et al. (1987) Nucleic Acids Res. 15:6131-6148) or a chimeric RNA-DNA analogue (Inoue et al. (1987) FEBS Lett. 215:327-330).

[0079] In still another embodiment, an antisense nucleic acid of the invention is a ribozyme. Ribozymes are catalytic RNA molecules with ribonuclease activity which are capable of cleaving a single-stranded nucleic acid, such as an mRNA, to which they have a complementary region. Thus, ribozymes (e.g., hammerhead ribozymes (described in Haselhoff and Gerlach (1988) Nature 334:585-591)) can be used to catalytically cleave mRNA transcripts to thereby inhibit translation of mRNA. A ribozyme having specificity for an -encoding nucleic acid can be designed based upon the nucleotide sequence of aDNA disclosed herein. For example, a derivative of a Tetrahymena L-19 IVS RNA can be constructed in which the nucleotide sequence of the active site is complementary to the nucleotide sequence to be cleaved in an -encoding mRNA. See, e.g., Cech et al. U.S. Pat. No. 4,987,071 and Cech et al. U.S. Pat. No. 5,116,742. Alternatively, mRNA can be used to select a catalytic RNA having a specific ribonuclease activity from a pool of RNA molecules. See, e.g., Bartel, D. and Szostak, J. W. (1993) Science 261:1411-1418.

[0080] Alternatively, gene expression can be inhibited by targeting nucleotide sequences complementary to the regulatory region of a nucleotide sequence (e.g., an promoter and/or enhancers) to form triple helical structures that prevent transcription of an gene in target cells. See generally, Helene, C. (1991) Anticancer Drug Des. 6(6):569-84; Helene, C. et al. (1992) Ann. N.Y Acad. Sci. 660:27-36; and Maher, L. J. (1992) Bioassays 14(12):807-15.

II. Recombinant Expression Vectors and Host Cells

[0081] Another aspect of the invention pertains to vectors, preferably expression vectors, containing a nucleic acid encoding a protein (or a portion thereof). As used herein, the term “vector” refers to a nucleic acid molecule capable of transporting another nucleic acid to which it has been linked. One type of vector is a “plasmid”, which refers to a circular double stranded DNA loop into which additional DNA segments can be ligated. Another type of vector is a viral vector, wherein additional DNA segments can be ligated into the viral genome. Certain vectors are capable of autonomous replication in a host cell into which they are introduced (e.g., bacterial vectors having a bacterial origin of replication and episomal mammalian vectors). Other vectors (e.g., bacterial suicide vectors) are integrated into the genome of a host cell upon introduction into the host cell, and thereby are replicated along with the host genome. Moreover, certain vectors are capable of directing the expression of genes to which they are operatively linked. Such vectors are referred to herein as “expression vectors”. In general, expression vectors of utility in recombinant DNA techniques are often in the form of plasmids. In the present specification, “plasmid” and “vector” can be used interchangeably as the plasmid is the most commonly used form of vector. However, the invention is intended to include such other forms of expression vectors, such as bacteriophages or viral vectors (e.g., replication defective retroviruses, adenoviruses and adeno-associated viruses), which serve equivalent functions.

[0082] The recombinant expression vectors of the invention comprise a nucleic acid of the invention in a form suitable for expression of the nucleic acid in a host cell, which means that the recombinant expression vectors include one or more regulatory sequences, selected on the basis of the host cells to be used for expression, which is operatively linked to the nucleic acid sequence to be expressed. Within a recombinant expression vector, “operably linked” is intended to mean that the nucleotide sequence of interest is linked to the regulatory sequence(s) in a manner which allows for expression of the nucleotide sequence (e.g., in an in vitro transcription/translation system or in a host cell when the vector is introduced into the host cell). The term “regulatory sequence” is intended to include promoters, repressor binding sites, activator binding sites, enhancers and other expression control elements (e.g., terminators, polyadenylation signals, or other elements of mRNA secondary structure). Such regulatory sequences are described, for example, in Goeddel; Gene Expression Technology: Methods in Enzymology 185, Academic Press, San Diego, Calif. (1990). Regulatory sequences include those which direct constitutive expression of a nucleotide sequence in many types of host cell and those which direct expression of the nucleotide sequence only in certain host cells. Preferred regulatory sequences are, for example, promoters such as cos-, tac-, trp-, tet-, trp-tet-, lpp-, lac-, lpp-lac-, lacI^{q}-, T7-, T5-, T3-, gal-, trc-, ara-, SP6-, arny, SPO2, λ-P_{R}- or λ P_{L}, which are used preferably in bacteria. Additional regulatory sequences are, for example, promoters from yeasts and fungi, such as ADC1, MFα, AC, P-60, CYC1, GAPDH, TEF, rp28, ADH, promoters from plants such as CaMV/35S, SSU, OCS, lib4, usp, STLS1, B33, nos or ubiquitin- or phaseolin-promoters. It is also possible to use artificial promoters. It will be appreciated by one of ordinary skill in the art that the design of the expression vector can depend on such factors as the choice of the host cell to be transformed, the level of expression of protein desired, etc. The expression vectors of the invention can be introduced into host cells to thereby produce proteins or peptides, including fusion proteins or peptides, encoded by nucleic acids as described herein (e.g., proteins, mutant forms of proteins, fusion proteins, etc.).

[0083] The recombinant expression vectors of the invention can be designed for expression of proteins in prokaryotic or eukaryotic cells. For example, genes can be expressed in bacterial cells such as S. saprophyticus or E. coli, insect cells (using baculovirus expression vectors), yeast and other fungal cells (see Romanos, M. A. et al. (1992) “Foreign gene expression in yeast: a review”, Yeast 8: 423-488; van den Hondel, C. A. M. J. J. et al. (1991) “Heterologous gene expression in filamentous fungi” in: More Gene Manipulations in Fungi, J. W. Bennet & L. L. Lasure, eds., p. 396-428: Academic Press: San Diego; and van den Hondel, C. A. M. J. J. & Punt, P. J. (1991) “Gene transfer systems and vector development for filamentous fungi, in: Applied Molecular Genetics of Fungi, Peberdy, J. F. et al., eds., p. 1-28, Cambridge University Press: Cambridge), algae and multicellular plant cells (see Schmidt, R. and Willmitzer, L. (1988) High efficiency Agrobacterium tumefaciens -mediated transformation of Arabidopsis thaliana leaf and cotyledon explants” Plant Cell Rep.: 583-586), or mammalian cells. Suitable host cells are discussed further in Goeddel, Gene Expression Technology: Methods in Enzymology 185, Academic Press, San Diego, Calif. (1990). Alternatively, the recombinant expression vector can be transcribed and translated in vitro, for example using T7 promoter regulatory sequences and T7 polymerase.

[0084] Expression of proteins in prokaryotes is most often carried out with vectors containing constitutive or inducible promoters directing the expression of either fusion or non-fusion proteins. Fusion vectors add a number of amino acids to a protein encoded therein, usually to the amino terminus of the recombinant protein but also to the C-terminus or fused within suitable regions in the proteins. Such fusion vectors typically serve three purposes: 1) to increase expression of recombinant protein; 2) to increase the solubility of the recombinant protein; and 3) to aid in the purification of the recombinant protein by acting as a ligand in affinity purification. Often, in fusion expression vectors, a proteolytic cleavage site is introduced at the junction of the fusion moiety and the recombinant protein to enable separation of the recombinant protein from the fusion moiety subsequent to purification of the fusion protein. Such enzymes, and their cognate recognition sequences, include Factor Xa, thrombin and enterokinase.

[0085] Typical fusion expression vectors include pGEX (Pharmacia Biotech Inc; Smith, D. B. and Johnson, K. S. (1988) Gene 67:31-40), pMAL (New England Biolabs, Beverly, Mass.) and pRIT5 (Pharmacia, Piscataway, N.J.) which fuse glutathione S-transferase (GST), maltose E binding protein, or protein A, respectively, to the target recombinant protein. In one embodiment, the coding sequence of the protein is cloned into a pGEX expression vector to create a vector encoding a fusion protein comprising, from the N-terminus to the C-terminus, GST-thrombin cleavage site-X protein. The fusion protein can be purified by affinity chromatography using glutathione-agarose resin. Recombinant protein unfused to GST can be recovered by cleavage of the fusion protein with thrombin.

[0086] Examples of suitable inducible non-fusion E. coli expression vectors include pTrc (Amann et al., (1988) Gene 69:301-315) pLG338, pACYC184, pBR322, pUC18, pUC19, pKC30, pRep4, pHS1, pHS2, pPLc236, pMBL24, pLG200, pUR290, pIN-III113-B1, λgt11, pBdCl, and pET11d (Studier et al., Gene Expression Technology: Methods in Enzymology 185, Academic Press, San Diego, Calif. (1990) 60-89; and Pouwels et al., eds. (1985) Cloning Vectors. Elsevier: New York IBSN 0 444 904018). Target gene expression from the pTrc vector relies on host RNA polymerase transcription from a hybrid trp-lac fusion promoter. Target gene expression from the pET11d vector relies on transcription from a T7 gn10-lac fusion promoter mediated by a coexpressed viral RNA polymerase (T7 gn1). This viral polymerase is supplied by host strains BL21(DE3) or HMS174(DE3) from a resident λ prophage harboring a T7 gn1 gene under the transcriptional control of the lacUV 5 promoter. For transformation of other varieties of bacteria, appropriate vectors may be selected.

[0087] One strategy to maximize recombinant protein expression is to express the protein in a host bacteria with an impaired capacity to proteolytically cleave the recombinant protein (Gottesman, S., Gene Expression Technology: Methods in Enzymology 185, Academic Press, San Diego, Calif. (1990) 119-128). Another strategy is to alter the nucleic acid sequence of the nucleic acid to be inserted into an expression vector so that the individual codons for each amino acid are those preferentially utilized in the bacterium chosen for expression, such as S. saprophyticus orE. coli (Wada et al. (1992) Nucleic Acids Res. 20:2111-2118). Such alteration of nucleic acid sequences of the invention can be carried out by standard DNA synthesis techniques.

[0088] In another embodiment, the protein expression vector is a yeast expression vector. Examples of vectors for expression in yeast S. cerevisiae include pYepSec 1 (Baldari, et al., (1987) Embo J. 6:229-234), 2 μ, pAG-1, Yep6, Yep13, pEMBLYe23, pMFa (Kurjan and Herskowitz, (1982) Cell 30:933-943), pJRY88 (Schultz et al., (1987) Gene 54:113-123), and pYES2 (Invitrogen Corporation, San Diego, Calif.). Vectors and methods for the construction of vectors appropriate for use in other fungi, such as the filamentous fungi, include those detailed in: van den Hondel, C. A. M. J. J. & Punt, P.J. (1991) “Gene transfer systems and vector development for filamentous fungi, in: Applied Molecular Genetics of Fungi, J. F. Peberdy, et al., eds., p. 1-28, Cambridge University Press: Cambridge, and Pouwels et al., eds. (1985) Cloning Vectors. Elsevier: New York (IBSN 0 444 904018).

[0089] Alternatively, the proteins of the invention can be expressed in insect cells using baculovirus expression vectors. Baculovirus vectors available for expression of proteins in cultured insect cells (e.g., Sf 9 cells) include the pAc series (Smith et al. (1983) Mol. Cell Biol. 3:2156-2165) and the pVL series (Lucklow and Summers (1989) Virology 170:31-39).

[0090] In another embodiment, the proteins of the invention may be expressed in unicellular plant cells (such as algae) or in plant cells from higher plants (e.g., the spermatophytes, such as crop plants). Examples of plant expression vectors include those detailed in: Becker, D., Kemper, E., Schell, J. and Masterson, R. (1992) “New plant binary vectors with selectable markers located proximal to the left border”, Plant Mol. Biol. 20: 1195-1197; and Bevan, M. W. (1984) “Binary Agrobacterium vectors for plant transformation”, Nucl. Acid. Res. 12: 8711-8721, and include pLGV23, pGHlac+, pBIN19, pAK2004, and pDH51 (Pouwels et al., eds. (1985) Cloning Vectors. Elsevier: New York IBSN 0 444 904018).

[0091] In yet another embodiment, a nucleic acid of the invention is expressed in mammalian cells using a mammalian expression vector. Examples of mammalian expression vectors include pCDM8 (Seed, B. (1987) Nature 329:840) and pMT2PC (Kaufman et al. (1987) EMBO J. 6:187-195). When used in mammalian cells, the expression vector's control functions are often provided by viral regulatory elements. For example, commonly used promoters are derived from polyoma, Adenovirus 2, cytomegalovirus and Simian Virus 40. For other suitable expression systems for both prokaryotic and eukaryotic cells see chapters 16 and 17 of Sambrook, J., Fritsh, E. F., and Maniatis, T. Molecular Cloning: A Laboratory Manual. 2nd, ed., Cold Spring Harbor Laboratory, Cold Spring Harbor Laboratory Press, Cold Spring Harbor, N.Y., 1989.

[0092] In another embodiment, the recombinant mammalian expression vector is capable of directing expression of the nucleic acid preferentially in a particular cell type (e.g., tissue-specific regulatory elements are used to express the nucleic acid). Tissue-specific regulatory elements are known in the art. Non-limiting examples of suitable tissue-specific promoters include the albumin promoter (liver-specific; Pinkert et al. (1987) Genes Dev. 1:268-277), lymphoid-specific promoters (Calame and Eaton (1988) Adv. Immunol. 43:235-275), in particular promoters of T cell receptors (Winoto and Baltimore (1989) EMBO J. 8:729-733) and immunoglobulins (Banerji et al. (1983) Cell 33:729-740; Queen and Baltimore (1983) Cell 33:741-748), neuron-specific promoters (e.g., the neurofilament promoter; Byrne and Ruddle (1989) PNAS 86:5473-5477), pancreas-specific promoters (Edlund et al. (1985) Science 230:912-916), and mammary gland-specific promoters (e.g., milk whey promoter; U.S. Pat. No. 4,873,316 and European Application Publication No. 264,166). Developmentally-regulated promoters are also encompassed, for example the murine hox promoters (Kessel and Gruss (1990) Science 249:374-379) and the α-fetoprotein promoter (Campes and Tilghman (1989) Genes Dev. 3:537-546).

[0093] The invention further provides a recombinant expression vector comprising a DNA molecule of the invention cloned into the expression vector in an antisense orientation. That is, the DNA molecule is operatively linked to a regulatory sequence in a manner which allows for expression (by transcription of the DNA molecule) of an RNA molecule which is antisense to mRNA. Regulatory sequences operatively linked to a nucleic acid cloned in the antisense orientation can be chosen which direct the continuous expression of the antisense RNA molecule in a variety of cell types, for instance viral promoters and/or enhancers, or regulatory sequences can be chosen which direct constitutive, tissue specific or cell type specific, e.g., bacterial cell specific expression of antisense RNA. The antisense expression vector can be in the form of a recombinant plasmid, phagemid or attenuated virus in which antisense nucleic acids are produced under the control of a high efficiency regulatory region, the activity of which can be determined by the cell type into which the vector is introduced. For a discussion of the regulation of gene expression using antisense genes see Weintraub, H. et al., Antisense RNA as a molecular tool for genetic analysis, Reviews—Trends in Genetics, Vol. 1(1) 1986.

[0094] Another aspect of the invention pertains to host cells into which a recombinant expression vector of the invention has been introduced. The terms “host cell” and “recombinant host cell” are used interchangeably herein. It is understood that such terms refer not only to the particular subject cell but to the progeny or potential progeny of such a cell. Because certain modifications may occur in succeeding generations due to either mutation or environmental influences, such progeny may not, in fact, be identical to the parent cell, but are still included within the scope of the term as used herein.

[0095] A host cell can be any prokaryotic or eukaryotic cell. For example, a protein of the invention can be expressed in bacterial cells such as Staphylococcus or Escherichia cells, e.g., S. saprophyticus or E. coli cells, insect cells, yeast or mammalian cells (such as Chinese hamster ovary cells (CHO) or COS cells). Other suitable host cells are known to those of ordinary skill in the art.

[0096] Vector DNA can be introduced into prokaryotic or eukaryotic cells via conventional transformation or transfection techniques. As used herein, the terms “transformation” and “transfection”, “conjugation” and “transduction” are intended to refer to a variety of art-recognized techniques for introducing foreign nucleic acid (e.g., linear DNA or RNA (e.g., a linearized vector or a gene construct alone without a vector) or nucleic acid in the form of a vector (e.g., a plasmid, phage, phasmid, phagemid, transposon or other DNA) into a host cell, including calcium phosphate or calcium chloride co-precipitation, DEAE-dextran-mediated transfection, lipofection, natural competence, chemical-mediated transfer, conjugation, or electroporation. Suitable methods for transforming or transfecting host cells can be found in Sambrook, et al. (Molecular Cloning: A Laboratory Manual. 2nd, ed., Cold Spring Harbor Laboratory, Cold Spring Harbor Laboratory Press, Cold Spring Harbor, N.Y., 1989), and other laboratory manuals.

[0097] For stable transfection of mammalian cells, it is known that, depending upon the expression vector and transfection technique used, only a small fraction of cells may integrate the foreign DNA into their genome. In order to identify and select these integrants, a gene that encodes a selectable marker (e.g., resistance to antibiotics) is generally introduced into the host cells along with the gene of interest. Preferred selectable markers include those which confer resistance to drugs, such as G418, hygromycin and methotrexate. Nucleic acid encoding a selectable marker can be introduced into a host cell on the same vector as that encoding a protein or can be introduced on a separate vector. Cells stably transfected with the introduced nucleic acid can be identified by drug selection (e.g., cells that have incorporated the selectable marker gene will survive, while the other cells die).

[0098] To create a homologous recombinant microorganism, a vector is prepared which contains at least a portion of a gene of the invention into which a deletion, addition or substitution has been introduced to thereby alter, e.g., functionally disrupting the gene. Preferably, this gene is an S. saprophyticus gene, but it can be a homologue from a related bacterium or even from a mammalian, yeast, or insect source. In a preferred embodiment, the vector is designed such that, upon homologous recombination, the endogenous gene is functionally disrupted (i.e., no longer encodes a functional protein; also referred to as a “knock out” vector). Alternatively, the vector can be designed such that, upon homologous recombination, the endogenous gene is mutated or otherwise altered but still encodes functional protein (e.g., the upstream regulatory region can be altered to thereby alter the expression of the endogenous protein). In the homologous recombination vector, the altered portion of the gene is flanked at its 5′ and 3′ ends by additional nucleic acid of the gene to allow for homologous recombination to occur between the exogenous gene carried by the vector and an endogenous gene in a microorganism. The additional flanking nucleic acid is of sufficient length for successful homologous recombination with the endogenous gene. Typically, several hundred basepairs of flanking DNA are included in the vector (see e.g., Thomas, K. R., and Capecchi, M. R. (1987) Cell 51: 503 for a description of homologous recombination vectors). The vector is introduced into a microorganism (e.g., by electroporation) and cells in which the introduced gene has homologously recombined with the endogenous gene are selected, using art-known techniques.

[0099] In another embodiment, recombinant microorganisms can be produced which contain selected systems which allow for regulated expression of the introduced gene. For example, inclusion of a gene of the invention on a vector placing it under control of the lac operon permits expression of the gene only in the presence of an inducer such as, for example, IPTG. Such regulatory systems are well known in the art.

[0100] In another embodiment, an endogenous gene in a host cell is disrupted (e.g., by homologous recombination or other genetic means known in the art) such that expression of its protein product does not occur. In another embodiment, an endogenous or introduced gene in a host cell has been altered by one or more point mutations, deletions, or inversions, but still encodes a functional protein. In still another embodiment, one or more of the regulatory regions (e.g., a promoter, repressor, or inducer) of an gene in a microorganism has been altered (e.g., by deletion, insertion, truncation, inversion, or point mutation) such that the expression of the gene is modulated. One of ordinary skill in the art will appreciate that host cells containing more than one of the described gene and protein modifications may be readily produced using the methods of the invention, and are meant to be included in the present invention.

[0101] A host cell of the invention, such as a prokaryotic or eukaryotic host cell in culture, can be used to produce (i.e., express) a protein. Accordingly, the invention further provides methods for producing proteins using the host cells of the invention. In one embodiment, the method comprises culturing the host cell of invention (into which a recombinant expression vector encoding a protein has been introduced, or into which genome has been introduced a gene encoding a wild-type or altered protein) in a suitable medium until protein is produced. In another embodiment, the method further comprises isolating proteins from the medium or the host cell.

III. Isolated Polypeptides

[0102] Another aspect of the invention pertains to isolated proteins, and biologically active portions thereof. An “isolated” or “purified” protein or biologically active portion thereof is substantially free of cellular material when produced by recombinant DNA techniques, or chemical precursors or other chemicals when chemically synthesized. The language “substantially free of cellular material” includes preparations of protein in which the protein is separated from cellular components of the cells in which it is naturally or recombinantly produced. In one embodiment, the language “substantially free of cellular material” includes preparations of protein having less than about 30% (by dry weight) of non-protein (also referred to herein as a “contaminating protein” ), more preferably less than about 20% of non-protein, still more preferably less than about 10% of non-protein, and most preferably less than about 5% non-protein. When the protein or biologically active portion thereof is recombinantly produced, it is also preferably substantially free of culture medium, i.e., culture medium represents less than about 20%, more preferably less than about 10%, and most preferably less than about 5% of the volume of the protein preparation. The language “substantially free of chemical precursors or other chemicals” includes preparations of protein in which the protein is separated from chemical precursors or other chemicals which are involved in the synthesis of the protein. In one embodiment, the language “substantially free of chemical precursors or other chemicals” includes preparations of protein having less than about 30% (by dry weight) of chemical precursors or non-chemicals, more preferably less than about 20% chemical precursors or non-chemicals, still more preferably less than about 10% chemical precursors or non-chemicals, and most preferably less than about 5% chemical precursors or non-chemicals. In preferred embodiments, isolated proteins or biologically active portions thereof lack contaminating proteins from the same organism from which the protein is derived. Typically, such proteins are produced by recombinant expression of, for example, a S. saprophyticus protein of the invention in a microorganism such as S. saprophyticus.

[0103] An isolated protein or a portion thereof of the invention can retain an S. saprophyticus biological activity or has one or more of the activities set forth in FIG. 1. In preferred embodiments, the protein or portion thereof comprises an amino acid sequence which is sufficiently homologous to an amino acid sequence encoded by the nucleic acid sequences of FIG. 1 such that the protein or portion thereof maintains the ability to retain an S. saprophyticus biological activity in an amino acid sequence or has one or more of the activities set forth in FIG. 1. The portion of the protein is preferably a biologically active portion as described herein. In another preferred embodiment, a protein of the invention has an amino acid sequence shown in FIG. 1. In yet another preferred embodiment, the protein has an amino acid sequence which is encoded by a nucleotide sequence which hybridizes, e.g., hybridizes under stringent conditions, to a nucleotide sequence of FIG. 1. In still another preferred embodiment, the protein has an amino acid sequence which is encoded by a nucleotide sequence that is at least about 50%, 51%, 52%, 53%, 54%, 55%, 56%, 57%, 58%, 59%, or 60%, preferably at least about 61%, 62%, 63%, 64%, 65%, 66%, 67%, 68%, 69%, or 70%, more preferably at least about 71%, 72%, 73%, 74%, 75%, 76%, 77%, 78%, 79%, or 80%, 81%, 82%, 83%, 84%, 85%, 86%, 87%, 88%, 89%, or 90%, or 91%, 92%, 93%, 94%, and even more preferably at least about 95%, 96%, 97%, 98%, 99% or more homologous to one of the nucleic acid sequences of FIG. 1, or a portion thereof. Ranges and identity values intermediate to the above-recited values, (e.g., 70-90% identical or 80-95% identical) are also intended to be encompassed by the present invention. For example, ranges of identity values using a combination of any of the above values recited as upper and/or lower limits are intended to be included. The preferred proteins of the present invention also preferably possess at least one of the activities described herein. For example, a preferred protein of the present invention includes an amino acid sequence encoded by a nucleotide sequence which hybridizes, e.g., hybridizes under stringent conditions, to a nucleotide sequence of FIG. 1, and which retains an S. saprophyticus biological activity or which has one or more of the activities set forth in FIG. 1.

[0104] In other embodiments, the protein is substantially homologous to an amino acid sequence encoded by the nucleic acid sequence of FIG. 1 and retains the functional activity of the protein of one of the sequences of FIG. 1 yet differs in amino acid sequence due to natural variation or mutagenesis, as described in detail above. Accordingly, in another embodiment, the protein is a protein which comprises an amino acid sequence which is at least about 50%, 51%, 52%, 53%, 54%, 55%, 56%, 57%, 58%, 59%, or 60%, preferably at least about 61%, 62%, 63%, 64%, 65%, 66%, 67%, 68%, 69%, or 70%, more preferably at least about 71%, 72%, 73%, 74%, 75%, 76%, 77%, 78%, 79%, or 80%, 81%, 82%, 83%, 84%, 85%, 86%, 87%, 88%, 89%, or 90%, or 91%, 92%, 93%, 94%, and even more preferably at least about 95%, 96%, 97%, 98%, 99% or more homologous to an entire amino acid sequence encoded by the nucleic acid sequence of FIG. 1 and which has at least one of the activities described herein. Ranges and identity values intermediate to the above-recited values, (e.g., 70-90% identical or 80-95% identical) are also intended to be encompassed by the present invention. For example, ranges of identity values using a combination of any of the above values recited as upper and/or lower limits are intended to be included. In another embodiment, the invention pertains to a full length S. saprophyticus protein which is substantially homologous to an entire amino acid sequence encoded by a nucleic acid sequence of FIG. 1.

[0105] Biologically active portions of a protein include peptides comprising amino acid sequences derived from the amino acid sequence of a protein, e.g., the amino acid sequence encoded by the nucleic acid sequence shown in FIG. 1 or the amino acid sequence of a protein homologous to a protein, which include fewer amino acids than a full length protein or the full length protein which is homologous to a protein, and exhibit at least one activity of a protein. Typically, biologically active portions (peptides, e.g., peptides which are, for example, 5, 10, 15, 20, 30, 35, 40, 50, 60, 70, 80, 90, 100, 120, 130, 140, 150, 160, 170, 180, 190, 200, 225, 250, 275, 300, 325, 350, 375, or more amino acids in length) comprise a domain or motif with at least one activity of a protein. Moreover, other biologically active portions, in which other regions of the protein are deleted, can be prepared by recombinant techniques and evaluated for one or more of the activities described herein. Preferably, the biologically active portions of a protein of the invention include one or more selected domains/motifs or portions thereof having biological activity.

[0106] Proteins of the invention are preferably produced by recombinant DNA techniques. For example, a nucleic acid molecule encoding the protein is cloned into an expression vector (as described above), the expression vector is introduced into a host cell (as described above) and the protein is expressed in the host cell. The protein can then be isolated from the cells by an appropriate purification scheme using standard protein purification techniques. Alternative to recombinant expression, a protein, polypeptide, or peptide can be synthesized chemically using standard peptide synthesis techniques. Moreover, native protein can be isolated from cells (e.g., bacterial cells), for example using an anti-antibody, which can be produced by standard techniques utilizing a protein or fragment thereof of this invention.

[0107] The invention also provides chimeric or fusion proteins. As used herein, an “chimeric protein” or “fusion protein” comprises a polypeptide operatively linked to a non-polypeptide. An “polypeptide” refers to a polypeptide having an amino acid sequence corresponding to, whereas a “non-polypeptide” refers to a polypeptide having an amino acid sequence corresponding to a protein which is not substantially homologous to the protein, e.g., a protein which is different from the protein and which is derived from the same or a different organism. Within the fusion protein, the term “operatively linked” is intended to indicate that the polypeptide and the non-polypeptide are fused in-frame to each other. The non-polypeptide can be fused to the N-terminus or C-terminus of the polypeptide. For example, in one embodiment the fusion protein is a GST-fusion protein in which the sequences are fused to the C-terminus of the GST sequences. Such fusion proteins can facilitate the purification of recombinant proteins. In another embodiment, the fusion protein is a protein containing a heterologous signal sequence at its N-terminus. In certain host cells (e.g., mammalian host cells), expression and/or secretion of a protein can be increased through use of a heterologous signal sequence.

[0108] Preferably, a chimeric or fusion protein of the invention is produced by standard recombinant DNA techniques. For example, DNA fragments coding for the different polypeptide sequences are ligated together in-frame in accordance with conventional techniques, for example by employing blunt-ended or stagger-ended termini for ligation, restriction enzyme digestion to provide for appropriate termini, filling-in of cohesive ends as appropriate, alkaline phosphatase treatment to avoid undesirable joining, and enzymatic ligation. In another embodiment, the fusion gene can be synthesized by conventional techniques including automated DNA synthesizers. Alternatively, PCR amplification of gene fragments can be carried out using anchor primers which give rise to complementary overhangs between two consecutive gene fragments which can subsequently be annealed and reamplified to generate a chimeric gene sequence (see, for example, Current Protocols in Molecular Biology, eds. Ausubel et al. John Wiley & Sons: 1992). Moreover, many expression vectors are commercially available that already encode a fusion moiety (e.g., a GST polypeptide). An -encoding nucleic acid can be cloned into such an expression vector such that the fusion moiety is linked in-frame to the protein.

[0109] Homologues of the protein can be generated by mutagenesis, e.g., discrete point mutation or truncation of the protein. As used herein, the term “homologue” refers to a variant form of the protein which acts as an agonist or antagonist of the activity of the protein. An agonist of the protein can retain substantially the same, or a subset, of the biological activities of the protein. An antagonist of the protein can inhibit one or more of the activities of the naturally occurring form of the protein, by, for example, competitively binding to a downstream or upstream member of the cascade or pathway, e.g., metabolic pathway, which includes the protein.

[0110] In an alternative embodiment, homologues of the protein can be identified by screening combinatorial libraries of mutants, e.g., truncation mutants, of the protein for protein agonist or antagonist activity. In one embodiment, a variegated library of variants is generated by combinatorial mutagenesis at the nucleic acid level and is encoded by a variegated gene library. A variegated library of variants can be produced by, for example, enzymatically ligating a mixture of synthetic oligonucleotides into gene sequences such that a degenerate set of potential sequences is expressible as individual polypeptides, or alternatively, as a set of larger fusion proteins (e.g., for phage display) containing the set of sequences therein. There are a variety of methods which can be used to produce libraries of potential homologues from a degenerate oligonucleotide sequence. Chemical synthesis of a degenerate gene sequence can be performed in an automatic DNA synthesizer, and the synthetic gene then ligated into an appropriate expression vector. Use of a degenerate set of genes allows for the provision, in one mixture, of all of the sequences encoding the desired set of potential sequences. Methods for synthesizing degenerate oligonucleotides are known in the art (see, e.g., Narang, S. A. (1983) Tetrahedron 39:3; Itakura et al. (1984) Annu. Rev. Biochem. 53:323; Itakura et al. (1984) Science 198:1056; Ike et al. (1983) Nucleic Acid Res. 11:477.

[0111] In addition, libraries of fragments of the protein coding can be used to generate a variegated population of fragments for screening and subsequent selection of homologues of a protein. In one embodiment, a library of coding sequence fragments can be generated by treating a double stranded PCR fragment of a coding sequence with a nuclease under conditions wherein nicking occurs only about once per molecule, denaturing the double stranded DNA, renaturing the DNA to form double stranded DNA which can include sense/antisense pairs from different nicked products, removing single stranded portions from reformed duplexes by treatment with S1 nuclease, and ligating the resulting fragment library into an expression vector. By this method, an expression library can be derived which encodes N-terminal, C-terminal and internal fragments of various sizes of the protein.

[0112] Several techniques are known in the art for screening gene products of combinatorial libraries made by point mutations or truncation, and for screening cDNA libraries for gene products having a selected property. Such techniques are adaptable for rapid screening of the gene libraries generated by the combinatorial mutagenesis of homologues. The most widely used techniques, which are amenable to high through-put analysis, for screening large gene libraries typically include cloning the gene library into replicable expression vectors, transforming appropriate cells with the resulting library of vectors, and expressing the combinatorial genes under conditions in which detection of a desired activity facilitates isolation of the vector encoding the gene whose product was detected. Recursive ensemble mutagenesis (REM), a new technique which enhances the frequency of functional mutants in the libraries, can be used in combination with the screening assays to identify homologues (Arkin and Yourvan (1992) PNAS 89:7811-7815; Delgrave et al. (1993) Protein Engineering 6(3):327-331).

[0113] In another embodiment, cell based assays can be exploited to analyze a variegated library, using methods well known in the art.

IV. Uses and Methods of the Invention

[0114] The nucleic acid molecules, proteins, protein homologues, fusion proteins, primers, vectors, and host cells described herein can be used in a variety of methods including, for example, one or more of the following methods: identification of S. saprophyticus and related organisms, diagnosis of an S. saprophyticus-associated disease or disorder, e.g., a urinary tract infection in a subject; mapping of genomes of organisms related to S. saprophyticus; identification and localization of S. saprophyticus sequences of interest; evolutionary studies; determination of protein regions required for function; modulation of an S. saprophyticus protein activity. Furthermore, the nucleic acid and polypeptide sequences of the invention are be useful for the identification of anti-bacterial compounds, e.g., small molecule inhibitors. In addition, the nucleic acid and polypeptide sequences of the invention can be utilized to elucidate anti-bacterial mechanisms. Moreover, the nucleic acid and polypeptide molecules of the invention may be utilized for epidemiological studies. For example, to better understand the spread of disease, e.g., the global spread of disease.

[0115] The nucleic acid molecules of the invention have a variety of uses. First, they may be used to identify an organism as being S. saprophyticus or a close relative thereof. Also, they may be used to identify the presence of S. saprophyticus or a relative thereof in a mixed population of microorganisms. The invention provides the nucleic acid sequences of a number of S. saprophyticus genes; by probing the extracted genomic DNA of a culture of a unique or mixed population of microorganisms under stringent conditions with a probe spanning a region of an S. saprophyticus gene which is unique to this organism, one can ascertain whether this organism is present.

V. Diagnostics

[0116] In one embodiment, the invention provides a method of identifying the presence or activity of S. saprophyticus in a subject. This method includes detection of one or more of the nucleic acid or amino acid sequences of the invention (e.g., the sequences set forth in FIG. 1 or FIG. 1) in a subject, thereby detecting the presence or activity of S. saprophyticus in the subject.

[0117] An exemplary method for detecting the presence or absence of a polypeptide of the invention in a subject involves obtaining a biological sample from a test subject and contacting the biological sample with a compound or an agent capable of detecting S. saprophyticus polypeptide or nucleic acid (e.g., mRNA, or genomic DNA) that encodes S. saprophyticus polypeptide such that the presence of S. saprophyticus polypeptide or nucleic acid is detected in the biological sample. In another aspect, the present invention provides a method for detecting the presence of S. saprophyticus activity in a biological sample by contacting the biological sample with an agent capable of detecting an indicator of S. saprophyticus biological activity such that the presence of S. saprophyticus biological activity is detected in the biological sample. A preferred agent for detecting S. saprophyticus mRNA or genomic DNA is a labeled nucleic acid probe capable of hybridizing to S. saprophyticus mRNA or genomic DNA. The nucleic acid probe can be, for example, the S. saprophyticus nucleic acid set forth in FIG. 1, or a portion thereof, such as an oligonucleotide of at least 15, 30, 50, 100, 250 or 500 nucleotides in length and sufficient to specifically hybridize under stringent conditions to S. saprophyticus mRNA or genomic DNA. Other suitable probes for use in the diagnostic assays of the invention are described herein.

[0118] A preferred agent for detecting an S. saprophyticus polypeptide is an antibody capable of binding to S. saprophyticus polypeptide, preferably an antibody with a detectable label. Antibodies can be polyclonal, or more preferably, monoclonal. An intact antibody, or a fragment thereof (e.g., Fab or F(ab′)2) can be used. The term “labeled”, with regard to the probe or antibody, is intended to encompass direct labeling of the probe or antibody by coupling (i.e., physically linking) a detectable substance to the probe or antibody, as well as indirect labeling of the probe or antibody by reactivity with another reagent that is directly labeled. Examples of indirect labeling include detection of a primary antibody using a fluorescently labeled secondary antibody and end-labeling of a DNA probe with biotin such that it can be detected with fluorescently labeled streptavidin. The term “biological sample” is intended to include tissues, cells and biological fluids isolated from a subject, e.g., urine, as well as tissues, cells and fluids present within a subject. That is, the detection method of the invention can be used to detect S. saprophyticus mRNA, polypeptide, or genomic DNA in a biological sample in vitro as well as in vivo. For example, in vitro techniques for detection of S. saprophyticus mRNA include Northern hybridizations and in situ hybridizations as well as PCR based assays, e.g., using the probes and primers identified herein. In vitro techniques for detection of S. saprophyticus polypeptide include enzyme linked immunosorbent assays (ELISAs), Western blots, immunoprecipitations and immunofluorescence. In vitro techniques for detection of S. saprophyticus genomic DNA include Southern hybridizations. Furthermore, in vivo techniques for detection of S. saprophyticus polypeptide include introducing into a subject a labeled anti-S. saprophyticus antibody. For example, the antibody can be labeled with a radioactive marker whose presence and location in a subject can be detected by standard imaging techniques.

[0119] The present invention also provides diagnostic assays for identifying the presence or absence of a genetic alteration characterized by at least one of (i) aberrant modification or mutation of a gene encoding an S. saprophyticus polypeptide; (ii) aberrant expression of a gene encoding an S. saprophyticus polypeptide; (iii) mis-regulation of a gene of the present invention; and (iii) aberrant post-translational modification of an S. saprophyticus polypeptide, wherein a wild-type form of the gene encodes a polypeptide with an S. saprophyticus biological activity. “Misexpression or aberrant expression”, as used herein, refers to a non-wild type pattern of gene expression, at the RNA or protein level. It includes, but is not limited to, expression at non-wild type levels (e.g., over or under expression); a pattern of expression that differs from wild type in terms of the time or stage at which the gene is expressed (e.g., increased or decreased expression (as compared with wild type) at a predetermined developmental period or stage); a pattern of expression that differs from wild type in terms of decreased expression (as compared with wild type) in a predetermined cell type or tissue type; a pattern of expression that differs from wild type in terms of the splicing size, amino acid sequence, post-transitional modification, or biological activity of the expressed polypeptide; a pattern of expression that differs from wild type in terms of the effect of an environmental stimulus or extracellular stimulus on expression of the gene (e.g., a pattern of increased or decreased expression (as compared with wild type) in the presence of an increase or decrease in the strength of the stimulus).

[0120] In one embodiment, the biological sample contains protein molecules from the test subject. Alternatively, the biological sample can contain mRNA molecules from the test subject or genomic DNA molecules from the test subject. A preferred biological sample is a serum sample isolated by conventional means from a subject.

[0121] In another embodiment, the methods further involve obtaining a control biological sample from a control subject, contacting the control sample with a compound or agent capable of detecting S. saprophyticus polypeptide, mRNA, or genomic DNA, such that the presence of S. saprophyticus polypeptide, mRNA or genomic DNA is detected in the biological sample, and comparing the presence of S. saprophyticus polypeptide, MRNA or genomic DNA in the control sample with the presence of S. saprophyticus polypeptide, mRNA or genomic DNA in the test sample.

[0122] The invention also encompasses kits for detecting the presence of S. saprophyticus in a biological sample. For example, the kit can comprise a labeled compound or agent capable of detecting S. saprophyticus polypeptide or mRNA in a biological sample; means for determining the amount of S. saprophyticus in the sample; and means for comparing the amount of S. saprophyticus in the sample with a standard. The compound or agent can be packaged in a suitable container. The kit can further comprise instructions for using the kit to detect S. saprophyticus polypeptide or nucleic acid.

[0123] The nucleic acid and protein molecules of the invention may also serve as markers for specific regions of the genome. This has utility not only in the mapping of the genome, but also for functional studies of S. saprophyticus proteins. For example, to identify the region of the genome to which a particular S. saprophyticus DNA-binding protein binds, the S. saprophyticus genome could be digested, and the fragments incubated with the DNA-binding protein. Those which bind the protein may be additionally probed with the nucleic acid molecules of the invention, preferably with readily detectable labels; binding of such a nucleic acid molecule to the genome fragment enables the localization of the fragment to the genome map of S. saprophyticus, and, when performed multiple times with different enzymes, facilitates a rapid determination of the nucleic acid sequence to which the protein binds. Further, the nucleic acid molecules of the invention may be sufficiently homologous to the sequences of related species such that these nucleic acid molecules may serve as markers for the construction of a genomic map in related bacteria, such as e.g., a Staphyloccocus bacteria.

[0124] The nucleic acid and polypeptide molecules of the invention are also useful for evolutionary and protein structural studies. The metabolic processes in which the molecules of the invention participate are utilized by a wide variety of prokaryotic and eukaryotic cells; by comparing the sequences of the nucleic acid and polypeptide molecules of the present invention to those encoding similar enzymes from other organisms, the evolutionary relatedness of the organisms can be assessed. Similarly, such a comparison permits an assessment of which regions of the sequence are conserved and which are not, which may aid in determining those regions of the protein which are essential for the functioning of the enzyme. This type of determination is of value for protein engineering studies and may give an indication of what the protein can tolerate in terms of mutagenesis without losing function.

[0125] Manipulation of the nucleic acid molecules of the invention may result in the production of proteins having functional differences from the wild-type proteins. These proteins may be improved in efficiency or activity, may be present in greater numbers in the cell than is usual, or may be decreased in efficiency or activity.

[0126] The invention also provides methods for screening molecules which modulate the activity of a S. saprophyticus protein, either by interacting with the protein itself or a substrate or binding partner of the S. saprophyticus protein, or by modulating the transcription or translation of a nucleic acid molecule of the invention. In such methods, a microorganism expressing one or more proteins of the invention is contacted with one or more test compounds, and the effect of each test compound on the activity or level of expression of the protein is assessed.

VI. Screening Assays

[0127] (A) Primary Methods for Screening

[0128] The invention provides a method (also referred to herein as a “screening assay”) for identifying modulators, i.e., candidate or test compounds or agents (e.g., peptides, peptidomimetics, small molecules or other drugs) which bind to S. saprophyticus polypeptides, have a modulatory, e.g., inhibitory effect on, for example, S. saprophyticus polynucleotide expression or S. saprophyticus polypeptide activity, or have a modulatory, e.g., inhibitory effect on, for example, the expression or activity of S. saprophyticus polypeptide substrate, e.g., an anti-bacterial agent. In one embodiment, the agent eliminates infection, e.g., a S. saprophyticus infection, e.g., in a host. In another embodiment, the agent inhibits S. saprophyticus growth.

[0129] In one embodiment, the invention provides assays for screening candidate or test compounds which are substrates of an S. Saprophyticus polynucleotide or polypeptide or biologically active portion thereof. In another embodiment, the invention provides assays for screening candidate or test compounds which bind to or modulate the expression or activity of an S. Saprophyticus polynucleotide or polypeptide or biologically active portion thereof. The test compounds of the present invention can be obtained using any of the numerous approaches in combinatorial library methods known in the art, including: biological libraries; spatially addressable parallel solid phase or solution phase libraries; synthetic library methods requiring deconvolution; the ‘one-bead one-compound’ library method; and synthetic library methods using affinity chromatography selection. The biological library approach is limited to peptide libraries, while the other four approaches are applicable to peptide, non-peptide oligomer or small molecule libraries of compounds (Lam, K. S. (1997) Anticancer Drug Des. 12:145).

[0130] Examples of methods for the synthesis of molecular libraries can be found in the art, for example in: DeWitt et al. (1993) Proc. Natl. Acad. Sci. U.S.A. 90:6909; Erb et al. (1994) Proc. Natl. Acad. Sci. USA 91:11422; Zuckermann et al. (1994). J. Med. Chem. 37:2678; Cho et al. (1993) Science 261:1303; Carrell et al. (1994) Angew. Chem. Int. Ed. Engl. 33:2059; Carell et al. (1994) Angew. Chem. Int. Ed. Engl. 33:2061; and in Gallop et al. (1994) J. Med. Chem. 37:1233.

[0131] Libraries of compounds may be presented in solution (e.g., Houghten (1992) Biotechniques 13:412421), or on beads (Lam (1991) Nature 354:82-84), chips (Fodor (1993) Nature 364:555-556), bacteria (Ladner U.S. Pat. No. 5,223,409), spores (Ladner USP'409), plasmids (Cull et al. (1992) Proc Natl Acad Sci USA 89:1865-1869) or on phage (Scott and Smith (1990) Science 249:386-390); (Devlin (1990) Science 249:404-406); (Cwirla et al. (1990) Proc. Natl. Acad. Sci. 87:6378-6382); (Felici (1991) J. Mol. Biol. 222:301-310); (Ladner supra.).

[0132] In one embodiment, an assay is a cell-based assay in which a cell which expresses an S. Saprophyticus polypeptide or biologically active portion thereof is contacted with a test compound and the ability of the test compound to modulate S. saprophyticus polypeptide activity is determined.

[0133] The ability of the test compound to modulate S. saprophyticus polypeptide binding to a substrate or to bind to an S. saprophyticus polypeptide can also be determined. Determining the ability of the test compound to modulate S. saprophyticus polypeptide binding to a substrate can be accomplished, for example, by coupling the S. saprophyticus polypeptide substrate with a radioisotope or enzymatic label such that binding of the S. saprophyticus polypeptide to S. saprophyticus polypeptide can be determined by detecting the labeled S. saprophyticus polypeptide substrate in a complex. Alternatively, an S. saprophyticus polypeptide could be coupled with a radioisotope or enzymatic label to monitor the ability of a test compound to modulate S. saprophyticus polypeptide binding to an S. saprophyticus polypeptide substrate in a complex. Determining the ability of the test compound to bind to an S. saprophyticus polypeptide can be accomplished, for example, by coupling the compound with a radioisotope or enzymatic label such that binding of the compound to an S. saprophyticus polypeptide can be determined by detecting the labeled S. saprophyticus compound in a complex. For example, compounds (e.g., S. saprophyticus polypeptide substrate or small molecule modulators, e.g., inhibitors) can be labeled with ¹²⁵I, ³⁵S, ¹⁴C, or ³H, either directly or indirectly, and the radioisotope detected by direct counting of radioemmission or by scintillation counting. Alternatively, compounds can be enzymatically labeled with, for example, horseradish peroxidase, alkaline phosphatase, or luciferase, and the enzymatic label detected by determination of conversion of an appropriate substrate to product.

[0134] It is also within the scope of this invention to determine the ability of a compound (e.g., an S. saprophyticus polypeptide substrate) to interact with S. saprophyticus polypeptide without the labeling of any of the interactants. For example, a microphysiometer can be used to detect the interaction of a compound with S. saprophyticus polypeptide without the labeling of either the compound or the S. saprophyticus polypeptide. McConnell, H. M. et al. (1992) Science 257:1906-1912. As used herein, a “microphysiometer” (e.g., Cytosensor) is an analytical instrument that measures the rate at which a cell acidifies its environment using a light-addressable potentiometric sensor (LAPS). Changes in this acidification rate can be used as an indicator of the interaction between a compound, e.g., a small molecule, and an S. saprophyticus polypeptide.

[0135] In another embodiment, an assay is a cell-based assay comprising contacting a cell expressing an S. saprophyticus polypeptide target molecule (e.g., an S. saprophyticus polypeptide substrate) with a test compound and determining the ability of the test compound to modulate (e.g., stimulate or inhibit) the activity of the S. saprophyticus polypeptide target molecule. Determining the ability of the test compound to modulate the activity of an S. saprophyticus polypeptide target molecule can be accomplished, for example, by determining the ability of the S. saprophyticus polypeptide to bind to or interact with the S. saprophyticus polypeptide target molecule.

[0136] Determining the ability of the S. saprophyticus polypeptide, or a biologically active fragment thereof, to bind to or interact with an S. saprophyticus polypeptide target molecule can be accomplished by one of the methods described above for determining direct binding. In a preferred embodiment, determining the ability of the S. saprophyticus polypeptide to bind to or interact with an S. saprophyticus polypeptide target molecule can be accomplished by determining the activity of the target molecule. For example, the activity of the target molecule can be determined by detecting induction of a cellular second messenger of the target (i.e., intra-cellular Ca²⁺, diacylglycerol, IP₃, and the like), detecting catalytic/enzymatic activity of the target using an appropriate substrate, detecting the induction of a reporter gene (comprising a target-responsive regulatory element operatively linked to a nucleic acid encoding a detectable marker, e.g., luciferase), or detecting a target-regulated cellular response.

[0137] In yet another embodiment, an assay of the present invention is a cell-free assay in which an S. saprophyticus polypeptide or biologically active portion thereof is contacted with a test compound, e.g., small molecule, and the ability of the test compound to bind to the S. saprophyticus polypeptide or biologically active portion thereof is determined. Preferred biologically active portions of the S. saprophyticus polypeptides to be used in assays of the present invention include fragments which have a role in the initiation or progression of infection. Binding of the test compound to the S. saprophyticus polypeptide can be determined either directly or indirectly as described above. In a preferred embodiment, the assay includes contacting the S. saprophyticus polypeptide or biologically active portion thereof with a known compound which binds S. saprophyticus polypeptide to form an assay mixture, contacting the assay mixture with a test compound, , e.g., a small molecule, and determining the ability of the test compound to interact with an S. saprophyticus polypeptide, wherein determining the ability of the test compound to interact with an S. saprophyticus polypeptide comprises determining the ability of the test compound to preferentially bind to S. saprophyticus polypeptide or biologically active portion thereof as compared to the known compound.

[0138] In another embodiment, the assay is a cell-free assay in which an S. saprophyticus polypeptide or biologically active portion thereof is contacted with a test compound and the ability of the test compound to modulate (e.g., stimulate or inhibit) the activity of the S. saprophyticus polypeptide or biologically active portion thereof is determined. Determining the ability of the test compound to modulate the activity of an S. saprophyticus polypeptide can be accomplished, for example, by determining the ability of the S. saprophyticus polypeptide to bind to an S. saprophyticus polypeptide target molecule by one of the methods described above for determining direct binding. Determining the ability of the S. saprophyticus polypeptide to bind to an S. saprophyticus polypeptide target molecule can also be accomplished using a technology such as real-time Biomolecular Interaction Analysis (BIA). Sjolander, S. and Urbaniczky, C. (1991) Anal. Chem. 63:2338-2345 and Szabo et al. (1995) Curr. Opin. Struct. Biol. 5:699-705. As used herein, “BIA” is a technology for studying biospecific interactions in real time, without labeling any of the interactants (e.g., BIAcore). Changes in the optical phenomenon of surface plasmon resonance (SPR) can be used as an indication of real-time reactions between biological molecules.

[0139] In an alternative embodiment, determining the ability of the test compound to modulate the activity of an S. saprophyticus polypeptide can be accomplished by determining the ability of the S. saprophyticus polypeptide to further modulate the activity of a downstream effector of an S. saprophyticus polypeptide target molecule. For example, the activity of the effector molecule on an appropriate S. saprophyticus target can be determined or the binding of the effector to an appropriate S. saprophyticus target can be determined as previously described.

[0140] In yet another embodiment, the cell-free assay involves contacting an S. saprophyticus polypeptide or biologically active portion thereof with a known compound which binds the S. saprophyticus polypeptide to form an assay mixture, contacting the assay mixture with a test compound, e.g., a small molecule, and determining the ability of the test compound to interact with the S. saprophyticus polypeptide, wherein determining the ability of the test compound to interact with the S. saprophyticus polypeptide comprises determining the ability of the S. saprophyticus polypeptide to preferentially bind to or modulate the activity of an S. saprophyticus polypeptide target molecule. In more than one embodiment of the above assay methods of the present invention, it may be desirable to immobilize either an S. saprophyticus polypeptide or its target molecule to facilitate separation of complexed from uncomplexed forms of one or both of the proteins, as well as to accommodate automation of the assay. Binding of a test compound to an S. saprophyticus polypeptide, or interaction of an S. saprophyticus polypeptide with a target molecule in the presence and absence of a candidate compound, can be accomplished in any vessel suitable for containing the reactants. Examples of such vessels include microtiter plates, test tubes, and micro-centrifuge tubes. In one embodiment, a fusion protein can be provided which adds a domain that allows one or both of the proteins to be bound to a matrix. For example, glutathione-S-transferase/S. saprophyticus fusion proteins or glutathione-S-transferase/target fusion proteins can be adsorbed onto glutathione sepharose beads (Sigma Chemical, St. Louis, Mo.) or glutathione derivatized microtiter plates, which are then combined with the test compound or the test compound and either the non-adsorbed target protein or S. saprophyticus polypeptide, and the mixture incubated under conditions conducive to complex formation (e.g., at physiological conditions for salt and pH). Following incubation, the beads or microtiter plate wells are washed to remove any unbound components, the matrix immobilized in the case of beads, complex determined either directly or indirectly, for example, as described above. Alternatively, the complexes can be dissociated from the matrix, and the level of an S. saprophyticus polypeptide binding or activity determined using standard techniques.

[0141] Other techniques for immobilizing proteins on matrices can also be used in the screening assays of the invention. For example, either an S. saprophyticus polypeptide or an S. saprophyticus polypeptide target molecule can be immobilized utilizing conjugation of biotin and streptavidin. Biotinylated S. saprophyticus polypeptide or target molecules can be prepared from biotin-NHS(N-hydroxy-succinimide)using techniques known in the art (e.g., biotinylation kit, Pierce Chemicals, Rockford, Ill.), and immobilized in the wells of streptavidin-coated 96 well plates (Pierce Chemical). Alternatively, antibodies reactive with S. saprophyticus polypeptide or target molecules but which do not interfere with binding of the S. saprophyticus polypeptide to its target molecule can be derivatized to the wells of the plate, and unbound target or S. saprophyticus polypeptide trapped in the wells by antibody conjugation. Methods for detecting such complexes, in addition to those described above for the GST-immobilized complexes, include immunodetection of complexes using antibodies reactive with the S. saprophyticus polypeptide or target molecule, as well as enzyme-linked assays which rely on detecting an enzymatic activity associated with the S. saprophyticus polypeptide or target molecule.

[0142] In another embodiment, modulators of S. saprophyticus polypeptide expression are identified in a method wherein a cell is contacted with a candidate compound and the expression of S. saprophyticus mRNA or polypeptide in the cell is determined. The level of expression of S. saprophyticus mRNA or polypeptide in the presence of the candidate compound is compared to the level of expression of S. saprophyticus mRNA or polypeptide in the absence of the candidate compound. The candidate compound can then be identified as a modulator of S. saprophyticus polypeptides expression based on this comparison. For example, when expression of S. saprophyticus mRNA or polypeptide is greater (statistically significantly greater) in the presence of the candidate compound than in its absence, the candidate compound is identified as a stimulator of S. saprophyticus mRNA or polypeptide expression. Alternatively, when expression of S. saprophyticus mRNA or polypeptide is less (statistically significantly less) in the presence of the candidate compound than in its absence, the candidate compound is identified as an inhibitor of S. saprophyticus mRNA or polypeptide expression. The level of S. saprophyticus mRNA or polypeptide expression in the cells can be determined by methods described herein for detecting S. saprophyticus mRNA or polypeptide.

[0143] In yet another aspect of the invention, the S. saprophyticus polypeptides can be used as “bait proteins” in a two-hybrid assay or three-hybrid assay (see, e.g., U.S. Pat. No. 5,283,317; Zervos et al. (1993) Cell 72:223-232; Madura et al. (1993) J. Biol. Chem. 268:12046-12054; Bartel et al. (1993) Biotechniques 14:920-924; Iwabuchi et al. (1993) Oncogene 8:1693-1696; and Brent WO94/10300), to identify other proteins, which bind to or interact with S. saprophyticus polypeptide (“S. saprophyticus polypeptide-binding proteins” or “S. saprophyticus polypeptide-bp”) and are involved in S. saprophyticus polypeptide activity. Such S. saprophyticus polypeptide-binding proteins are also likely to be involved in the propagation of signals by the S. saprophyticus polypeptides or S. saprophyticus polypeptide targets as, for example, downstream elements of an S. saprophyticus polypeptide-mediated signaling pathway. Alternatively, such S. saprophyticus polypeptide-binding proteins are likely to be S. saprophyticus polypeptide inhibitors.

[0144] The two-hybrid system is based on the modular nature of most transcription factors, which consist of separable DNA-binding and activation domains. Briefly, the assay utilizes two different DNA constructs. In one construct, the gene that codes for an S. saprophyticus polypeptide is fused to a gene encoding the DNA binding domain of a known transcription factor (e.g., GAL-4). In the other construct, a DNA sequence, from a library of DNA sequences, that encodes an unidentified protein (“prey” or “sample”) is fused to a gene that codes for the activation domain of the known transcription factor. If the “bait” and the “prey” proteins are able to interact, in vivo, forming an S. saprophyticus polypeptide-dependent complex, the DNA-binding and activation domains of the transcription factor are brought into close proximity. This proximity allows transcription of a reporter gene (e.g., LacZ) which is operably linked to a transcriptional regulatory site responsive to the transcription factor. Expression of the reporter gene can be detected and cell colonies containing the functional transcription factor can be isolated and used to obtain the cloned gene which encodes the protein which interacts with the S. saprophyticus polypeptide.

[0145] In another aspect, the invention pertains to a combination of two or more of the assays described herein. For example, a modulating agent can be identified using a cell-based or a cell free assay, and the ability of the agent to modulate the activity of an S. saprophyticus polypeptide can be confirmed in vivo, e.g., in an animal such as an animal model for a S. saprophyticus-associated disease or disorder, e.g., a urinary tract infection.

[0146] This invention further pertains to novel agents, e.g., small molecules, identified by the above-described screening assays. Accordingly, it is within the scope of this invention to further use an agent identified as described herein in an appropriate animal model. For example, an agent identified as described herein (e.g., an S. saprophyticus polypeptide modulating agent, an antisense S. saprophyticus nucleic acid molecule, an S. saprophyticus-specific antibody, or an S. saprophyticus polypeptide-binding partner) can be used in an animal model to determine the efficacy, toxicity, or side effects of treatment with such an agent. Alternatively, an agent identified as described herein can be used in an animal model to determine the mechanism of action of such an agent. Furthermore, this invention pertains to uses of novel agents identified by the above-described screening assays for treatments as described herein.

[0147] Furthermore, the novel agents, e.g., small molecules, identified by the screening assays as described herein, but be further tested in a non-animal model assay, e.g., a DNA microarray, or a radioactive precursor incorporation assay.

[0148] (B) Secondary Screening of Polypeptides and Analogs

[0149] The high through-put assays described above can be followed by secondary screens in order to identify further biological activities which will, e.g., allow one skilled in the art to differentiate agonists from antagonists. The type of a secondary screen used will depend on the desired activity that needs to be tested. For example, an assay can be developed in which the ability to inhibit an interaction between a protein of interest and its respective ligand can be used to identify antagonists from a group of peptide fragments isolated though one of the primary screens described above.

[0150] Therefore, methods for generating fragments and analogs and testing them for activity are known in the art. Once the core sequence of interest is identified, it is routine for one skilled in the art to obtain analogs and fragments.

[0151] (C) Peptide Mimetics of S. saprophyticus Polypeptides

[0152] The invention also provides for reduction of the protein binding domains of the subject S. saprophyticus polypeptides to generate mimetics, e.g. peptide or non-peptide agents. The peptide mimetics are able to disrupt binding of a polypeptide to its counter ligand, e.g., in the case of an S. saprophyticus polypeptide binding to a naturally occurring ligand. The critical residues of a subject S. saprophyticus polypeptide which are involved in molecular recognition of a polypeptide can be determined and used to generate S. saprophyticus-derived peptidomimetics which competitively or noncompetitively inhibit binding of the S. saprophyticus polypeptide with an interacting polypeptide (see, for example, European patent applications EP-412,762A and EP-B31,080A).

[0153] For example, scanning mutagenesis can be used to map the amino acid residues of a particular S. saprophyticus polypeptide involved in binding an interacting polypeptide, peptidomimetic compounds (e.g. diazepine or isoquinoline derivatives) can be generated which mimic those residues in binding to an interacting polypeptide, and which therefore can inhibit binding of an S. saprophyticus polypeptide to an interacting polypeptide and thereby interfere with the function of S. saprophyticus polypeptide. For instance, non-hydrolyzable peptide analogs of such residues can be generated using benzodiazepine (e.g., see Freidinger et al. in Peptides: Chemistry and Biology, G. R. Marshall ed., ESCOM Publisher: Leiden, Netherlands, 1988), azepine (e.g., see Huffinan et al. in Peptides: Chemistry and Biology, G. R. Marshall ed., ESCOM Publisher: Leiden, Netherlands, 1988), substituted gama lactam rings (Garvey et al. in Peptides: Chemistry and Biology, G. R. Marshall ed., ESCOM Publisher: Leiden, Netherlands, 1988), keto-methylene pseudopeptides (Ewenson et al. (1986) J Med Chem 29:295; and Ewenson et al. in Peptides: Structure and Function (Proceedings of the 9th American Peptide Symposium) Pierce Chemical Co. Rockland, Ill., 1985), β-turn dipeptide cores (Nagai et al. (1985) Tetrahedron Lett 26:647; and Sato et al. (1986) J Chem Soc Perkin Trans 1:1231), and β-aminoalcohols (Gordon et al. (1985) Biochem Biophys Res Commun 126:419; and Dann et al. (1986) Biochem Biophys Res Commun 134:71).

VII. Identification of Nucleic Acids Encoding Vaccine Components and Targets for Agents Effective Azainst S. saprophyticus

[0154] The disclosed S. saprophyticus genome sequence includes segments that direct the synthesis of ribonucleic acids and polypeptides, as well as origins of replication, promoters, other types of regulatory sequences, and intergenic nucleic acids. The invention encompasses nucleic acids encoding immunogenic components of vaccines and targets for agents effective against S. saprophyticus. Identification of said immunogenic components involved in the determination of the function of the disclosed sequences can be achieved using a variety of approaches. Non-limiting examples of these approaches are described briefly below.

[0155] (A) Homology to known sequences: Computer-assisted comparison of the disclosed S. saprophyticus sequences with previously reported sequences present in publicly available databases is useful for identifying functional S. saprophyticus nucleic acid and polypeptide sequences. It will be understood that protein-coding sequences, for example, may be compared as a whole, and that a high degree of sequence homology between two proteins (such as, for example, >80-90%) at the amino acid level indicates that the two proteins also possess some degree of functional homology, such as, for example, among enzymes involved in metabolism, DNA synthesis, or cell wall synthesis, and proteins involved in transport, cell division, etc. In addition, many structural features of particular protein classes have been identified and correlate with specific consensus sequences, such as, for example, binding domains for nucleotides, DNA, metal ions, and other small molecules; sites for covalent modifications such as phosphorylation, acylation, and the like; sites of protein:protein interactions, etc. These consensus sequences may be quite short and thus may represent only a fraction of the entire protein-coding sequence. Identification of such a feature in an S. saprophyticus sequence is therefore useful in determining the function of the encoded protein and identifying useful targets of antibacterial drugs. S. saprophyticus proteins identified as containing putative signal sequences and/or transmembrane domains are useful as immunogenic components of vaccines.

[0156] (B) Identification of essential genes: Nucleic acids that encode proteins essential for growth or viability of S. saprophyticus are preferred drug targets. S. saprophyticus genes can be tested for their biological relevance to the organism by examining the effect of deleting and/or disrupting the genes, i.e., by so-called gene “knockout”, using techniques known to those skilled in the relevant art. In this manner, essential genes may be identified.

[0157] (C) Strain-specific sequences: Because of the evolutionary relationship between different S. saprophyticus strains, it is believed that the presently disclosed S. saprophyticus sequences are useful for identifying, and/or discriminating between, previously known and new S. saprophyticus strains. It is believed that other S. saprophyticus strains will exhibit at least 70%, 80%, 90% or more sequence homology with the presently disclosed sequence. Systematic and routine analyses of DNA sequences derived from samples containing S. saprophyticus strains, and comparison with the present sequence allows for the identification of sequences that can be used to discriminate between strains, as well as those that are common to all S. saprophyticus strains. In one embodiment, the invention provides nucleic acids, including probes, and peptide and polypeptide sequences that discriminate between different strains of S. saprophyticus. Strain-specific components can also be identified functionally by their ability to elicit or react with antibodies that selectively recognize one or more S. saprophyticus strains.

[0158] In another embodiment, the invention provides nucleic acids, including probes, and peptide and polypeptide sequences that are common to all S. saprophyticus strains but are not found in other bacterial species.

[0159] In another embodiment, the nucleic acids, including probes, and peptide and polypeptide sequences of the invention provide epidemiological utility to further understand the spread of disease.

[0160] (D) Specific Example: Determination Of Candidate Protein Antigens For Antibody And Vaccine Development

[0161] The selection of candidate protein antigens for vaccine development can be derived from the nucleic acids encoding S. saprophyticus polypeptides. First, the ORF's can be analyzed for homology to other known exported or membrane proteins and analyzed using the discriminant analysis described by Klein, et al. (Klein, P., Kanehsia, M., and DeLisi, C. (1985) Biochimica et Biophysica Acta 815, 468-476) for predicting exported and membrane proteins.

[0162] Homology searches can be performed using the BLAST algorithm contained in the Wisconsin Sequence Analysis Package (Genetics Computer Group, University Research Park, 575 Science Drive, Madison, Wis. 53711) to compare each predicted ORF amino acid sequence with all sequences found in the current GenBank, SWISS-PROT and PIR databases. BLAST searches for local alignments between the ORF and the databank sequences and reports a probability score which indicates the probability of finding this sequence by chance in the database. ORF's with significant homology (e.g. probabilities lower than 1×10⁻⁶ indicate that the homology is only due to random chance) to membrane or exported proteins represent protein antigens for vaccine development. Possible functions can be provided to S. saprophyticus genes based on sequence homology to genes cloned in other organisms, e.g., S. epidermitis (as set forth in FIG. 1).

[0163] Discriminant analysis (Klein, et al. supra) can be used to examine the ORF amino acid sequences. This algorithm uses the intrinsic information contained in the ORF amino acid sequence and compares it to information derived from the properties of known membrane and exported proteins. This comparison predicts which proteins will be exported, membrane associated or cytoplasmic. ORF amino acid sequences identified as exported or membrane associated by this algorithm are likely protein antigens for vaccine development.

[0164] Infrequently it is not possible to distinguish between multiple possible nucleotides at a given position in the nucleic acid sequence. In those cases the ambiguities are denoted by an extended alphabet as follows:

[0165] These are the official IUPAC-IUB single-letter base codes

| Code | Base Description | |
|---|---|---|
| G | Guanine | |
| A | Adenine | |
| T | Thymine | |
| C | Cytosine | |
| R | Purine | (A or G) |
| Y | Pyrimidine | (C or T or U) |
| M | Amino | (A or C) |
| K | Ketone | (G or T) |
| S | Strong interaction | (C or G) |
| W | Weak interaction | (A or T) |
| H | Not-G | (A or C or T) |
| B | Not-A | (C or G or T) |
| V | Not-T (not-U) | (A or C or G) |
| D | Not-C | (A or G or T) |
| N | Any | (A or C or G or T) |

[0166] The amino acid translations of this invention account for the ambiguity in the nucleic acid sequence by translating the ambiguous codon as the letter “X”. In all cases, the permissible amino acid residues at a position are clear from an examination of the nucleic acid sequence based on the standard genetic code.

VIII. Production of Fragments and Analogs of S. saprophyticus Nucleic Acids and Polypeptides

[0167] Based on the discovery of the S. saprophyticus gene products of the invention provided in FIG. 1, one skilled in the art can alter the disclosed structure (of S. saprophyticus genes), e.g., by producing fragments or analogs, and test the newly produced structures for activity. Examples of techniques known to those skilled in the relevant art which allow the production and testing of fragments and analogs are discussed below. These, or analogous methods can be used to make and screen libraries of polypeptides, e.g., libraries of random peptides or libraries of fragments or analogs of cellular proteins for the ability to bind S. saprophyticus polypeptides. Such screens are useful for the identification of inhibitors of S. saprophyticus, as described herein.

[0168] (A) Generation of Fragments

[0169] Fragments of a protein of the invention can be produced in several ways, e.g., recombinantly, by proteolytic digestion, or by chemical synthesis. Internal or terminal fragments of a polypeptide can be generated by removing one or more nucleotides from one end (for a terminal fragment) or both ends (for an internal fragment) of a nucleic acid which encodes the polypeptide. Expression of the mutagenized DNA produces polypeptide fragments. Digestion with “end-nibbling” endonucleases can thus generate DNA's which encode an array of fragments. DNA's which encode fragments of a protein can also be generated by random shearing, restriction digestion or a combination of the above-discussed methods.

[0170] Fragments can also be chemically synthesized using techniques known in the art such as conventional Merrifield solid phase f-Moc or t-Boc chemistry. For example, peptides of the present invention may be arbitrarily divided into fragments of desired length with no overlap of the fragments, or divided into overlapping fragments of a desired length.

[0171] (B) Alteration of Nucleic Acids and Polypeptides: Random Methods

[0172] Amino acid sequence variants of a protein of the invention can be prepared by random mutagenesis of DNA which encodes a protein or a particular domain or region of a protein. Useful methods include PCR mutagenesis and saturation mutagenesis. A library of random amino acid sequence variants can also be generated by the synthesis of a set of degenerate oligonucleotide sequences. (Methods for screening proteins in a library of variants are elsewhere herein).

[0173] (i) PCR Mutagenesis

[0174] In PCR mutagenesis, reduced Taq polymerase fidelity is used to introduce random mutations into a cloned fragment of DNA (Leung et al., 1989, Technique 1:11-15). The DNA region to be mutagenized is amplified using the polymerase chain reaction (PCR) under conditions that reduce the fidelity of DNA synthesis by Taq DNA polymerase, e.g., by using a dGTP/dATP ratio of five and adding Mn²⁺ to the PCR reaction. The pool of amplified DNA fragments are inserted into appropriate cloning vectors to provide random mutant libraries.

[0175] (ii) Saturation Mutagenesis

[0176] Saturation mutagenesis allows for the rapid introduction of a large number of single base substitutions into cloned DNA fragments (Mayers et al., 1985, Science 229:242). This technique includes generation of mutations, e.g., by chemical treatment or irradiation of single-stranded DNA in vitro, and synthesis of a complimentary DNA strand. The mutation frequency can be modulated by modulating the severity of the treatment, and essentially all possible base substitutions can be obtained. Because this procedure does not involve a genetic selection for mutant fragments both neutral substitutions, as well as those that alter function, are obtained. The distribution of point mutations is not biased toward conserved sequence elements.

[0177] (iii) Degenerate Oligonucleotides

[0178] A library of homologs can also be generated from a set of degenerate oligonucleotide sequences. Chemical synthesis of a degenerate sequences can be carried out in an automatic DNA synthesizer, and the synthetic genes then ligated into an appropriate expression vector. The synthesis of degenerate oligonucleotides is known in the art (see for example, Narang, SA (1983) Tetrahedron 39:3; Itakura et al. (1981) Recombinant DNA, Proc 3rd Cleveland Sympos. Macromolecules, ed. A G Walton, Amsterdam: Elsevier pp 273-289; Itakura et al. (1984) Annu. Rev. Biochem. 53:323; Itakura et al. (1984) Science 198:1056; Ike et al. (1983) Nucleic Acid Res. 11:477. Such techniques have been employed in the directed evolution of other proteins (see, for example, Scott et al. (1990) Science 249:386-390; Roberts et al. (1992) PNAS 89:2429-2433; Devlin et al. (1990) Science 249: 404-406; Cwirla et al. (1990) PNAS 87: 6378-6382; as well as U.S. Pat. Nos. 5,223,409, 5,198,346, and 5,096,815).

[0179] (C) Alteration of Nucleic Acids and Polypeptides: Methods for Directed Mutagenesis

[0180] Non-random or directed, mutagenesis techniques can be used to provide specific sequences or mutations in specific regions. These techniques can be used to create variants which include, e.g., deletions, insertions, or substitutions, of residues of the known amino acid sequence of a protein. The sites for mutation can be modified individually or in series, e.g., by (1) substituting first with conserved amino acids and then with more radical choices depending upon results achieved, (2) deleting the target residue, or (3) inserting residues of the same or a different class adjacent to the located site, or combinations of options 1-3.

[0181] (i) Alanine Scanning Mutagenesis

[0182] Alanine scanning mutagenesis is a useful method for identification of certain residues or regions of the desired protein that are preferred locations or domains for mutagenesis, Cunningham and Wells (Science 244:1081-1085, 1989). In alanine scanning, a residue or group of target residues are identified (e.g., charged residues such as Arg, Asp, His, Lys, and Glu) and replaced by a neutral or negatively charged amino acid (most preferably alanine or polyalanine). Replacement of an amino acid can affect the interaction of the amino acids with the surrounding aqueous environment in or outside the cell. Those domains demonstrating functional sensitivity to the substitutions are then refined by introducing further or other variants at or for the sites of substitution. Thus, while the site for introducing an amino acid sequence variation is predetermined, the nature of the mutation per se need not be predetermined. For example, to optimize the performance of a mutation at a given site, alanine scanning or random mutagenesis may be conducted at the target codon or region and the expressed desired protein subunit variants are screened for the optimal combination of desired activity.

[0183] (ii) Oligonucleotide-Mediated Mutagenesis

[0184] Oligonucleotide-mediated mutagenesis is a useful method for preparing substitution, deletion, and insertion variants of DNA, see, e.g., Adelman et al., (DNA 2:183, 1983). Briefly, the desired DNA is altered by hybridizing an oligonucleotide encoding a mutation to a DNA template, where the template is the single-stranded form of a plasmid or bacteriophage containing the unaltered or native DNA sequence of the desired protein. After hybridization, a DNA polymerase is used to synthesize an entire second complementary strand of the template that will thus incorporate the oligonucleotide primer, and will code for the selected alteration in the desired protein DNA. Generally, oligonucleotides of at least 25 nucleotides in length are used. An optimal oligonucleotide will have 12 to 15 nucleotides that are completely complementary to the template on either side of the nucleotide(s) coding for the mutation. This ensures that the oligonucleotide will hybridize properly to the single-stranded DNA template molecule. The oligonucleotides are readily synthesized using techniques known in the art such as that described by Crea et al. (Proc. Natl. Acad. Sci. USA, 75: 5765[1978]).

[0185] (iii) Cassette Mutagenesis

[0186] Another method for preparing variants, cassette mutagenesis, is based on the technique described by Wells et al. (Gene, 34:315[1985]). The starting material is a plasmid (or other vector) which includes the protein subunit DNA to be mutated. The codon(s) in the protein subunit DNA to be mutated are identified. There must be a unique restriction endonuclease site on each side of the identified mutation site(s). If no such restriction sites exist, they may be generated using the above-described oligonucleotide-mediated mutagenesis method to introduce them at appropriate locations in the desired protein subunit DNA. After the restriction sites have been introduced into the plasmid, the plasmid is cut at these sites to linearize it. A double-stranded oligonucleotide encoding the sequence of the DNA between the restriction sites but containing the desired mutation(s) is synthesized using standard procedures. The two strands are synthesized separately and then hybridized together using standard techniques. This double-stranded oligonucleotide is referred to as the cassette. This cassette is designed to have 3′ and 5′ ends that are comparable with the ends of the linearized plasmid, such that it can be directly ligated to the plasmid. This plasmid now contains the mutated desired protein subunit DNA sequence.

[0187] (iv) Combinatorial Mutagenesis

[0188] Combinatorial mutagenesis can also be used to generate mutants (Ladner et al., WO 88/06630). In this method, the amino acid sequences for a group of homologs or other related proteins are aligned, preferably to promote the highest homology possible. All of the amino acids which appear at a given position of the aligned sequences can be selected to create a degenerate set of combinatorial sequences. The variegated library of variants is generated by combinatorial mutagenesis at the nucleic acid level, and is encoded by a variegated gene library. For example, a mixture of synthetic oligonucleotides can be enzymatically ligated into gene sequences such that the degenerate set of potential sequences are expressible as individual peptides, or alternatively, as a set of larger fusion proteins containing the set of degenerate sequences.

[0189] (D) Other Modifications of S. saprophyticus Nucleic Acids and Polypeptides

[0190] It is possible to modify the structure of an S. saprophyticus polypeptide for such purposes as increasing solubility, enhancing stability (e.g., shelf life ex vivo and resistance to proteolytic degradation in vivo). A modified S. saprophyticus protein or peptide can be produced in which the amino acid sequence has been altered, such as by amino acid substitution, deletion, or addition as described herein.

[0191] An S. saprophyticus peptide can also be modified by substitution of cysteine residues preferably with alanine, serine, threonine, leucine or glutamic acid residues to minimize dimerization via disulfide linkages. In addition, amino acid side chains of fragments of the protein of the invention can be chemically modified. Another modification is cyclization of the peptide.

[0192] In order to enhance stability and/or reactivity, an S. saprophyticus polypeptide can be modified to incorporate one or more polymorphisms in the amino acid sequence of the protein resulting from any natural allelic variation. Additionally, D-amino acids, non-natural amino acids, or non-amino acid analogs can be substituted or added to produce a modified protein within the scope of this invention. Furthermore, an S. saprophyticus polypeptide can be modified using polyethylene glycol (PEG) according to the method of A. Sehon and co-workers (Wie et al., supra) to produce a protein conjugated with PEG. In addition, PEG can be added during chemical synthesis of the protein. Other modifications of S. saprophyticus proteins include reduction/alkylation (Tarr, Methods of protein Microcharacterization, J. E. Silver ed., Humana Press, Clifton N.J. 155-194 (1986)); acylation (Tarr, supra); chemical coupling to an appropriate carrier (Mishell and Shiigi, eds, Selected Methods in Cellular Immunology, W H Freeman, San Francisco, Calif. (1980), U.S. Pat. No. 4,939,239; or mild formalin treatment (Marsh, (1971) Int. Arch. of Allergy and Appl. Immunol., 41: 199-215).

[0193] To facilitate purification and potentially increase solubility of an S. saprophyticus protein or peptide, it is possible to add an amino acid fusion moiety to the peptide backbone. For example, hexa-histidine can be added to the protein for purification by immobilized metal ion affinity chromatography (Hochuli, E. et al., (1988) Bio/Technology, 6: 1321-1325). In addition, to facilitate isolation of peptides free of irrelevant sequences, specific endoprotease cleavage sites can be introduced between the sequences of the fusion moiety and the peptide.

[0194] To potentially aid proper antigen processing of epitopes within an S. saprophyticus polypeptide, canonical protease sensitive sites can be engineered between regions, each comprising at least one epitope via recombinant or synthetic methods. For example, charged amino acid pairs, such as KK or RR, can be introduced between regions within a protein or fragment during recombinant construction thereof. The resulting peptide can be rendered sensitive to cleavage by cathepsin and/or other trypsin-like enzymes which would generate portions of the protein containing one or more epitopes. In addition, such charged amino acid residues can result in an increase in the solubility of the peptide.

IX. Vaccine Formulations for S. saprophyticus Nucleic Acids and Polypeptides

[0195] This invention also features vaccine compositions or formulations (used interchangeably herein) for protection against infection by S. saprophyticus or for treatment of S. saprophyticus infection. As used herein, the term “treatment of S. saprophyticus-associated disease or disorder” refers to therapeutic treatment of an existing or established S. saprophyticus-associated disease or disorder. The terms “protection against S. saprophyticus-associated disease or disorder”or “prophylactic treatment” refer to the use of S. saprophyticus vaccine formulation for reducing the risk of or preventing an infection in a subject at risk for S. saprophyticus -associated disease or disorder. In one embodiment, the vaccine compositions contain one or more immunogenic components, such as a surface protein, from S. saprophyticus, or portion thereof, and a pharmaceutically acceptable carrier. For example, in one embodiment, the vaccine formulations of the invention contain at least one or combination of S. saprophyticus polypeptides or fragments thereof, from same or different S. saprophyticus antigens. Nucleic acids and S. saprophyticus polypeptides for use in the vaccine formulations of the invention include the nucleic acids and polypeptides set forth in FIG. 1 and B, preferably those S. saprophyticus nucleic acids that encode surface proteins and surface proteins or fragments thereof. However, any nucleic acid encoding an immunogenic S. saprophyticus protein and S. saprophyticus polypetide, or portion thereof, can be used in the present invention. These vaccines have therapeutic and/or prophylactic utilities.

[0196] One aspect of the invention provides a vaccine composition for protection against infection by S. saprophyticus which contains at least one immunogenic fragment of an S. saprophyticus protein and a pharmaceutically acceptable carrier. Preferred fragments include peptides of at least about 10 amino acid residues in length, preferably about 10, 11, 12, 13, 14, 15, 16, 17, 18, 19, 20 amino acid residues in length, and more preferably about 12-16 amino acid residues in length.

[0197] Immunogenic components of the invention can be obtained, for example, by screening polypeptides recombinantly produced from the corresponding fragment of the nucleic acid encoding the full-length S. saprophyticus protein. In addition, fragments can be chemically synthesized using techniques known in the art such as conventional Merrifield solid phase f-Moc or t-Boc chemistry.

[0198] In one embodiment, immunogenic components are identified by the ability of the peptide to stimulate T cells. Peptides which stimulate T cells, as determined by, for example, T cell proliferation or cytokine secretion are defined herein as comprising at least one T cell epitope. T cell epitopes are believed to be involved in initiation and perpetuation of the immune response to the protein immunogen. These T cell epitopes are thought to trigger early events at the level of the T helper cell by binding to an appropriate HLA molecule on the surface of an antigen presenting cell, thereby stimulating the T cell subpopulation with the relevant T cell receptor for the epitope. These events lead to T cell proliferation, lymphokine secretion, local inflammatory reactions, recruitment of additional immune cells to the site of antigen/T cell interaction, and activation of the B cell cascade, leading to the production of antibodies. A T cell epitope is the basic element, or smallest unit of recognition by a T cell receptor, where the epitope comprises amino acids essential to receptor recognition (e.g., approximately 6 or 7 amino acid residues). Amino acid sequences which mimic those of the T cell epitopes are within the scope of this invention.

[0199] In another embodiment, immunogenic components of the invention are identified through genomic vaccination. The basic protocol is based on the idea that expression libraries consisting of all or parts of a pathogen genome, e.g., an S. saprophyticus genome, can confer protection when used to genetically immunize a host. This expression library immunization (ELI) is analogous to expression cloning and involves reducing a genomic expression library of a pathogen, e.g., S. saprophyticus, into plasmids that can act as genetic vaccines. The plasmids can also be designed to encode genetic adjuvants which can dramatically stimulate the humoral response. These genetic adjuvants can be introduced at remote sites and act as well extracelluraly as intracellularly.

[0200] This is a new approach to vaccine production that has many of the advantages of live/attenuated pathogens but no risk of infection. An expression library of pathogen DNA is used to immunize a host thereby producing the effects of antigen presentation of a live vaccine without the risk. For example, in the present invention, random fragments from the S. saprophyticus genome or from cosmid or plasmid clones, as well as PCR products from genes identified by genomic sequencing, can be used to immunize a host. The feasibility of this approach has been demonstrated with Mycoplasma pulmonis (Barry et al., Nature 377:632-635, 1995), where even partial expression libraries of Mycoplasma pulmonis, a natural pathogen in rodents, provided protection against challenge from the pathogen.

[0201] ELI is a technique that allows for production of a non-infectious multipartite vaccine, even when little is known about pathogen's biology, because ELI uses the immune system to screen candidate genes. Once isolated, these genes can be used as genetic vaccines or for development of recombinant protein vaccines. Thus, ELI allows for production of vaccines in a systematic, largely mechanized fashion.

[0202] Screening immunogenic components can be accomplished using one or more of several different assays. For example, in vitro, peptide T cell stimulatory activity is assayed by contacting a peptide known or suspected of being immunogenic with an antigen presenting cell which presents appropriate MHC molecules in a T cell culture. Presentation of an immunogenic S. saprophyticus peptide in association with appropriate MHC molecules to T cells in conjunction with the necessary costimulation has the effect of transmitting a signal to the T cell that induces the production of increased levels of cytokines, particularly of interleukin-2 and interleukin-4. The culture supernatant can be obtained and assayed for interleukin-2 or other known cytokines. For example, any one of several conventional assays for interleukin-2 can be employed, such as the assay described in Proc. Natl. Acad. Sci USA, 86: 1333 (1989) the pertinent portions of which are incorporated herein by reference. A kit for an assay for the production of interferon is also available from Genzyme Corporation (Cambridge, Mass.).

[0203] Alternatively, a common assay for T cell proliferation entails measuring tritiated thymidine incorporation. The proliferation of T cells can be measured in vitro by determining the amount of ³H-labeled thymidine incorporated into the replicating DNA of cultured cells. Therefore, the rate of DNA synthesis and, in turn, the rate of cell division can be quantified.

[0204] Vaccine compositions or formulations of the invention containing one or more immunogenic components (e.g., S. saprophyticus polypeptide or fragment thereof or nucleic acid encoding an S. saprophyticus polypeptide or fragment thereof) preferably include a pharmaceutically acceptable carrier. The term “pharmaceutically acceptable carrier” is intended to include any and all solvents, dispersion media, coatings, antibacterial and antifungal agents, isotonic and absorption delaying agents, and the like, compatible with pharmaceutical administration. Suitable pharmaceutically acceptable carriers include, for example, one or more of water, saline, phosphate buffered saline, dextrose, glycerol, ethanol and the like, as well as combinations thereof. Pharmaceutically acceptable carriers may further comprise minor amounts of auxiliary substances such as wetting or emulsifying agents, preservatives or buffers, which enhance the shelf life or effectiveness of the S. saprophyticus nucleic acid or polypeptide. For vaccine formulations of the invention containing S. saprophyticus polypeptides, the polypeptide is preferably coadministered with a suitable adjuvant and/or a delivery system described herein.

[0205] It will be apparent to those of skill in the art that the therapeutically effective amount of DNA or protein of this invention will depend, inter alia, upon the administration schedule, the unit dose of an S. saprophyticus nucleic acid or polypeptide administered, whether the protein or nucleic acid is administered in combination with other therapeutic agents, the immune status and health of the patient, and the therapeutic activity of the particular protein or nucleic acid.

[0206] Vaccine formulations are conventionally administered parenterally, e.g., by injection, either subcutaneously or intramuscularly. Methods for intramuscular immunization are described by Wolff et al. (1990) Science 247: 1465-1468 and by Sedegah et al. (1994) Immunology 91: 9866-9870. Other modes of administration include oral and pulmonary formulations, suppositories, and transdermal applications. Oral immunization is preferred over parenteral methods for inducing protection against infection by S. saprophyticus. Czinn et. al. (1993) Vaccine 11: 637-642. Oral formulations include such normally employed excipients as, for example, pharmaceutical grades of mannitol, lactose, starch, magnesium stearate, sodium saccharine, cellulose, magnesium carbonate, and the like.

[0207] In one embodiment, the vaccine formulation includes, as a pharmaceutically acceptable carrier, an adjuvant. Examples of the suitable adjuvants for use in the vaccine formulations of the invention include, but are not limited, to aluminum hydroxide; N-acetyl-muramyl-L-threonyl-D-isoglutamine (thr-MDP); N-acetyl-nor-muramyl-L-alanyl-D-isoglutamine (CGP 11637, referred to as nor-MDP); N-acetylmuramyl-L-alanyl-D-isoglutaminyl-L-alanine-2-(1′-2′-dipalmitoyl-sn-glycero-3-hydroxyphos-phoryloxy)-ethylamine (CGP 19835A, referred to a MTP-PE); RIBI, which contains three components from bacteria; monophosphoryl lipid A; trehalose dimycoloate; cell wall skeleton (MPL+TDM +CWS) in a 2% squalene/Tween 80 emulsion; and cholera toxin. Others which may be used are non-toxic derivatives of cholera toxin, including its B subunit, and/or conjugates or genetically engineered fusions of the S. saprophyticus polypeptide with cholera toxin or its B subunit, procholeragenoid, fungal polysaccharides, including schizophyllan, muramyl dipeptide, muramyl dipeptide derivatives, phorbol esters, labile toxin of E. coli, non-S. saprophyticus bacterial lysates, block polymers or saponins.

[0208] In another embodiment, the vaccine formulation includes, as a pharmaceutically acceptable carrier, a delivery system. Suitable delivery systems for use in the vaccine formulations of the invention include biodegradable microcapsules or immuno-stimulating complexes (ISCOMs), cochleates, or liposomes, genetically engineered attenuated live vectors such as viruses or bacteria, and recombinant (chimeric) virus-like particles, e.g., bluetongue. In another embodiment of the invention, the vaccine formulation includes both a delivery system and an adjuvant.

[0209] Delivery systems in humans may include enteric release capsules protecting the antigen from the acidic environment of the stomach, and including S. saprophyticus polypeptide in an insoluble form as fusion proteins. Suitable carriers for the vaccines of the invention are enteric coated capsules and polylactide-glycolide microspheres. Suitable diluents are 0.2 N NaHCO3 and/or saline.

[0210] Vaccines of the invention can be administered as a primary prophylactic agent in adults or in children, as a secondary prevention, after successful eradication of S. saprophyticus in an infected host, or as a therapeutic agent in the aim to induce an immune response in a susceptible host to prevent infection by S. saprophiticus. The vaccines of the invention are administered in amounts readily determined by persons of ordinary skill in the art. Thus, for adults a suitable dosage will be in the range of 10 μg to 10 g, preferably 10 μg to 100 mg, for example 50 μg to 50 mg. A suitable dosage for adults will also be in the range of 5 μg to 500 mg. Similar dosage ranges will be applicable for children.

[0211] The amount of adjuvant employed will depend on the type of adjuvant used. For example, when the mucosal adjuvant is cholera toxin, it is suitably used in an amount of 5 μg to 50 μg, for example 10 μg to 35 μg. When used in the form of microcapsules, the amount used will depend on the amount employed in the matrix of the microcapsule to achieve the desired dosage. The determination of this amount is within the skill of a person of ordinary skill in the art.

[0212] Those skilled in the art will recognize that the optimal dose may be more or less depending upon the patient's body weight, disease, the route of administration, and other factors. Those skilled in the art will also recognize that appropriate dosage levels can be obtained based on results with known oral vaccines such as, for example, a vaccine based on an E. coli lysate (6 mg dose daily up to total of 540 mg) and with an enterotoxigenic E. coli purified antigen (4 doses of 1 mg) (Schulman et al., J. Urol. 150:917-921 (1993)); Boedecker et al., American Gastroenterological Assoc. 999:A-222 (1993)). The number of doses will depend upon the disease, the formulation, and efficacy data from clinical trials. Without intending any limitation as to the course of treatment, the treatment can be administered over 3 to 8 doses for a primary immunization schedule over 1 month (Boedeker, American Gastroenterological Assoc. 888:A-222 (1993)).

[0213] In a preferred embodiment, a vaccine composition of the invention can be based on a killed whole E. coli preparation with an immunogenic fragment of an S. saprophyticus protein of the invention expressed on its surface or it can be based on an E. coli lysate, wherein the killed E. coli acts as a carrier or an adjuvant.

[0214] It will be apparent to those skilled in the art that some of the vaccine compositions of the invention are useful only for preventing S. saprophyticus infection, some are useful only for treating S. saprophyticus infection, and some are useful for both preventing and treating S. saprophyticus infection. In a preferred embodiment, the vaccine composition of the invention provides protection against S. saprophyticus infection by stimulating humoral and/or cell-mediated immunity against S. saprophyticus. It should be understood that amelioration of any of the symptoms of S. saprophyticus-associated disease or disorder is a desirable clinical goal, including a lessening of the dosage of medication used to treat an S. saprophyticus-associated disease or disorder, or an increase in the production of antibodies in the serum or mucosal surfaces, e.g., of the urogenital tract of a subject.

X. Antibodies Reactive With S. saprophyticus Polvpeptides

[0215] The invention also includes antibodies specifically reactive with the subject S. saprophyticus polypeptide. Anti-protein/anti-peptide antisera or monoclonal antibodies can be made by standard protocols (See, for example, Antibodies: A Laboratory Manual ed. by Harlow and Lane (Cold Spring Harbor Press: 1988)). A mammal such as a mouse, a hamster or rabbit can be immunized with an immunogenic form of the peptide. Techniques for conferring immunogenicity on a protein or peptide include conjugation to carriers or other techniques well known in the art. An immunogenic portion of the subject S. saprophyticus polypeptide can be administered in the presence of adjuvant. The progress of immunization can be monitored by detection of antibody titers in plasma or serum. Standard ELISA or other immunoassays can be used with the immunogen as antigen to assess the levels of antibodies.

[0216] In a preferred embodiment, the subject antibodies are immunospecific for antigenic determinants of the S. saprophyticus polypeptides of the invention, e.g. antigenic determinants of a polypeptide of the invention contained in FIG. 1, or a closely related human or non-human mammalian homolog (e.g., 70%, 75%, 80%, 85%, 90%, 91%, 92%, 93%, 94%, 95%, 96%, 97%, 98%, or 99% homologous). In yet a further preferred embodiment of the invention, the anti-S. saprophyticus antibodies do not substantially cross react (i.e., react specifically) with a protein which is for example, less than 70% percent homologous to a sequence of the invention contained in FIG. 1. By “not substantially cross react”, it is meant that the antibody has a binding affinity for a non-homologous protein which is less than 10 percent, more preferably less than 5 percent, and even more preferably less than 1 percent, of the binding affinity for a protein of the invention contained in FIG. 1. In a most preferred embodiment, there is no crossreactivity between bacterial and mammalian antigens.

[0217] In preferred embodiments, the antibodies specifically bind to the S. saprophyticus polypeptides of the invention or a fragment thereof. The terms “antibody” and “antibodies” as used interchangeably herein refer to immunoglobulin molecules as well as fragments and derivatives thereof that comprise an immunologically active portion of an immunoglobulin molecule, (i.e., such a portion contains an antigen binding site which specifically binds an antigen, such as an S. saprophyticus polypeptide). An antibody which specifically binds to a protein of the invention is an antibody which binds the protein, but does not substantially bind other molecules in a sample, e.g., a biological sample, which naturally contains the protein. Examples of an immunologically active portion of an immunoglobulin molecule include, but are not limited to, single-chain antibodies (scAb), F(ab) and F(ab′)2 fragments.

[0218] An isolated protein of the invention or a fragment thereof can be used as an immunogen to generate antibodies. The full-length protein can be used or, alternatively, the invention provides antigenic peptide fragments for use as immunogens. The antigenic peptide of a protein of the invention comprises at least 8 (preferably 10, 15, 20, or 30 or more) amino acid residues of the amino acid sequence of one of the proteins of the invention, and encompasses at least one epitope of the protein such that an antibody raised against the peptide forms a specific immune complex with the protein. Preferred epitopes encompassed by the antigenic peptide are regions that are located on the surface of the protein, e.g., hydrophilic regions. Hydrophobicity sequence analysis, hydrophilicity sequence analysis, or similar analyses can be used to identify hydrophilic regions. In preferred embodiments, an isolated marker protein or fragment thereof is used as an immunogen.

[0219] An immunogen typically is used to prepare antibodies by immunizing a suitable (i.e. immunocompetent) subject such as a rabbit, goat, mouse, or other mammal. An appropriate immunogenic preparation can contain, for example, recombinantly-expressed or chemically-synthesized protein or peptide. The preparation can further include an adjuvant, such as Freund's complete or incomplete adjuvant, or a similar immunostimulatory agent. Preferred immunogen compositions are those that contain no other human proteins such as, for example, immunogen compositions made using a non-human host cell for recombinant expression of a protein of the invention. In such a manner, the resulting antibody compositions have reduced or no binding of human proteins other than a protein of the invention.

[0220] The invention provides polyclonal and monoclonal antibodies. The term “monoclonal antibody” or “monoclonal antibody composition”, as used herein, refers to a population of antibody molecules that contain only one species of an antigen binding site capable of immunoreacting with a particular epitope. Preferred polyclonal and monoclonal antibody compositions are ones that have been selected for antibodies directed against a protein of the invention. Particularly preferred polyclonal and monoclonal antibody preparations are ones that contain only antibodies directed against a marker protein or fragment thereof.

[0221] Polyclonal antibodies can be prepared by immunizing a suitable subject with a protein of the invention as an immunogen The antibody titer in the immunized subject can be monitored over time by standard techniques, such as with an enzyme linked immunosorbent assay (ELISA) using immobilized polypeptide. At an appropriate time after immunization, e.g., when the specific antibody titers are highest, antibody-producing cells can be obtained from the subject and used to prepare monoclonal antibodies (mAb) by standard techniques, such as the hybridoma technique originally described by Kohler and Milstein (1975) Nature 256:495497, the human B cell hybridoma technique (see Kozbor et al., 1983, Immunol. Today 4:72), the EBV-hybridoma technique (see Cole et al., pp. 77-96 In Monoclonal Antibodies and Cancer Therapy, Alan R. Liss, Inc., 1985) or trioma techniques. The technology for producing hybridomas is well known (see generally Current Protocols in Immunology, Coligan et al. ed., John Wiley & Sons, New York, 1994). Hybridoma cells producing a monoclonal antibody of the invention are detected by screening the hybridoma culture supernatants for antibodies that bind the polypeptide of interest, e.g., using a standard ELISA assay.

[0222] Alternative to preparing monoclonal antibody-secreting hybridomas, a monoclonal antibody directed against a protein of the invention can be identified and isolated by screening a recombinant combinatorial immunoglobulin library (e.g., an antibody phage display library) with the polypeptide of interest. Kits for generating and screening phage display libraries are commercially available (e.g., the Pharmacia Recombinant Phage Antibody System, Catalog No. 27-9400-01; and the Stratagene SurfZAP Phage Display Kit, Catalog No. 240612). Additionally, examples of methods and reagents particularly amenable for use in generating and screening antibody display library can be found in, for example, U.S. Pat. No. 5,223,409; PCT Publication No. WO 92/18619; PCT Publication No. WO 91/17271; PCT Publication No. WO 92/20791; PCT Publication No. WO 92/15679; PCT Publication No. WO 93/01288; PCT Publication No. WO 92/01047; PCT Publication No. WO 92/09690; PCT Publication No. WO 90/02809; Fuchs et al. (1991) Bio/Technology 9:1370-1372; Hay et al. (1992) Hum. Antibod. Hybridomas 3:81-85; Huse et al. (1989) Science 246:1275-1281; Griffiths et al. (1993) EMBO J. 12:725-734.

[0223] The invention also provides recombinant antibodies that specifically bind a protein of the invention. In preferred embodiments, the recombinant antibodies specifically binds an S. saprophyticus protein or fragment thereof. Recombinant antibodies include, but are not limited to, chimeric and humanized monoclonal antibodies, comprising both human and non-human portions, single-chain antibodies and multi-specific antibodies. A chimeric antibody is a molecule in which different portions are derived from different animal species, such as those having a variable region derived from a murine mAb and a human immunoglobulin constant region. (See, e.g., Cabilly et al., U.S. Pat. No. 4,816,567; and Boss et al., U.S. Pat. No. 4,816,397, which are incorporated herein by reference in their entirety.) Single-chain antibodies have an antigen binding site and consist of a single polypeptide. They can be produced by techniques known in the art, for example using methods described in Ladner et. al U.S. Pat. No. 4,946,778 (which is incorporated herein by reference in its entirety); Bird et al., (1988) Science 242:423-426; Whitlow et al., (1991) Methods in Enzymology 2:1-9; Whitlow et al., (1991) Methods in Enzymology 2:97-105; and Huston et al., (1991) Methods in Enzymology Molecular Design and Modeling: Concepts and Applications 203:46-88. Multi-specific antibodies are antibody molecules having at least two antigen-binding sites that specifically bind different antigens. Such molecules can be produced by techniques known in the art, for example using methods described in Segal, U.S. Pat. No. 4,676,980 (the disclosure of which is incorporated herein by reference in its entirety); Holliger et al., (1993) Proc. Natl. Acad. Sci. USA 90:6444-6448; Whitlow et al., (1994) Protein Eng. 7:1017-1026 and U.S. Pat. No. 6,121,424.

[0224] Humanized antibodies are antibody molecules from non-human species having one or more complementarity determining regions (CDRs) from the non-human species and a framework region from a human immunoglobulin molecule. (See, e.g., Queen, U.S. Pat. No. 5,585,089, which is incorporated herein by reference in its entirety.) Humanized monoclonal antibodies can be produced by recombinant DNA techniques known in the art, for example using methods described in PCT Publication No. WO 87/02671; European Patent Application 184,187; European Patent Application 171,496; European Patent Application 173,494; PCT Publication No. WO 86/01533; U.S. Pat. No. 4,816,567; European Patent Application 125,023; Better et al. (1988) Science 240:1041-1043; Liu et al. (1987) Proc. Natl. Acad. Sci. USA 84:3439-3443; Liu et al. (1987) J. Immunol. 139:3521-3526; Sun et al. (1987) Proc. Natl. Acad. Sci. USA 84:214-218; Nishimura et al. (1987) Cancer Res. 47:999-1005; Wood et al. (1985) Nature 314:446-449; and Shaw et al. (1988) J. Natl. Cancer Inst. 80:1553-1559); Morrison (1985) Science 229:1202-1207; Oi et al. (1986) Bio/Techniques 4:214; U.S. Pat. No. 5,225,539; Jones et al. (1986) Nature 321:552-525; Verhoeyan et al. (1988) Science 239:1534; and Beidler et al. (1988) J. Immunol. 141:4053-4060.

[0225] More particularly, humanized antibodies can be produced, for example, using transgenic mice which are incapable of expressing endogenous immunoglobulin heavy and light chains genes, but which can express human heavy and light chain genes. The transgenic mice are immunized in the normal fashion with a selected antigen, e.g., all or a portion of a polypeptide corresponding to an S. saprophyticus polypeptide Monoclonal antibodies directed against the antigen can be obtained using conventional hybridoma technology. The human immunoglobulin transgenes harbored by the transgenic mice rearrange during B cell differentiation, and subsequently undergo class switching and somatic mutation. Thus, using such a technique, it is possible to produce therapeutically useful IgG, IgA and IgE antibodies. For an overview of this technology for producing human antibodies, see Lonberg and Huszar (1995) Int. Rev. Immunol. 13:65-93). For a detailed discussion of this technology for producing human antibodies and human monoclonal antibodies and protocols for producing such antibodies, see, e.g., U.S. Pat. No. 5,625,126; U.S. Pat. No. 5,633,425; U.S. Pat. No. 5,569,825; U.S. Pat. No. 5,661,016; and U.S. Pat. No. 5,545,806. In addition, companies such as Abgenix, Inc. (Freemont, Calif.), can be engaged to provide human antibodies directed against a selected antigen using technology similar to that described above.

[0226] Completely human antibodies which recognize a selected epitope can be generated using a technique referred to as “guided selection.” In this approach a selected non-human monoclonal antibody, e.g., a murine antibody, is used to guide the selection of a completely human antibody recognizing the same epitope (Jespers et al., 1994, Bio/technology 12:899-903).

[0227] The antibodies of the invention can be isolated after production (e.g., from the blood or serum of the subject) or synthesis and further purified by well-known techniques. For example, IgG antibodies can be purified using protein A chromatography. Antibodies specific for a protein of the invention can be selected or (e.g., partially purified) or purified by, e.g., affinity chromatography. For example, a recombinantly expressed and purified (or partially purified) protein of the invention is produced as described herein, and covalently or non-covalently coupled to a solid support such as, for example, a chromatography column. The column can then be used to affinity purify antibodies specific for the proteins of the invention from a sample containing antibodies directed against a large number of different epitopes, thereby generating a substantially purified antibody composition, i.e., one that is substantially free of contaminating antibodies. By a substantially purified antibody composition is meant, in this context, that the antibody sample contains at most only 30% (by dry weight) of contaminating antibodies directed against epitopes other than those of the desired protein of the invention, and preferably at most 20%, yet more preferably at most 10%, and most preferably at most 5% (by dry weight) of the sample is contaminating antibodies. A purified antibody composition means that at least 99% of the antibodies in the composition are directed against the desired protein of the invention.

[0228] In a preferred embodiment, the substantially purified antibodies of the invention may specifically bind to a signal peptide, a secreted sequence, an extracellular domain, a transmembrane or a cytoplasmic domain of a protein of the invention. In a particularly preferred embodiment, the substantially purified antibodies of the invention specifically bind to a secreted sequence or an extracellular domain of the amino acid sequences of a protein of the invention. In a more preferred embodiment, the substantially purified antibodies of the invention specifically bind to a secreted sequence or an extracellular domain of the amino acid sequences of a marker protein.

[0229] An antibody directed against a protein of the invention can be used to isolate the protein by standard techniques, such as affinity chromatography or immunoprecipitation. Moreover, such an antibody can be used to detect an S. saprophyticus protein or fragment thereof (e.g., in a cellular lysate or cell supernatant) in order to evaluate the level and pattern of expression of the marker. The antibodies can also be used diagnostically to monitor protein levels in tissues or body fluids (e.g. in a cervical-associated body fluid) as part of a clinical testing procedure, e.g., to, for example, determine the efficacy of a given treatment regimen. Detection can be facilitated by the use of an antibody derivative, which comprises an antibody of the invention coupled to a detectable substance. Examples of detectable substances include various enzymes, prosthetic groups, fluorescent materials, luminescent materials, bioluminescent materials, and radioactive materials. Examples of suitable enzymes include horseradish peroxidase, alkaline phosphatase, β-galactosidase, or acetylcholinesterase; examples of suitable prosthetic group complexes include streptavidin/biotin and avidin/biotin; examples of suitable fluorescent materials include umbelliferone, fluorescein, fluorescein isothiocyanate, rhodamine, dichlorotriazinylamine fluorescein, dansyl chloride or phycoerythrin; an example of a luminescent material includes luminol; examples of bioluminescent materials include luciferase, luciferin, and aequorin, and examples of suitable radioactive material include 125I, 131I, 35S or 3H.

[0230] Antibodies of the invention may also be used as therapeutic agents in treating an S. saprophyticus-associated disease and disorder. In a preferred embodiment, completely human antibodies of the invention are used for therapeutic treatment of human patients, particularly those having an S. saprophyticus-associated disease and disorder, e.g., urinary tract infection.

[0231] Accordingly, in one aspect, the invention provides substantially purified antibodies, antibody fragments and derivatives, all of which specifically bind to a protein of the invention and preferably, an S. saprophyticus protein. In various embodiments, the substantially purified antibodies of the invention, or fragments or derivatives thereof, can be human, non-human, chimeric and/or humanized antibodies. In another aspect, the invention provides non-human antibodies, antibody fragments and derivatives, all of which specifically bind to a protein of the invention and preferably, a marker protein. Such non-human antibodies can be goat, mouse, sheep, horse, chicken, rabbit, or rat antibodies. Alternatively, the non-human antibodies of the invention can be chimeric and/or humanized antibodies. In addition, the non-human antibodies of the invention can be polyclonal antibodies or monoclonal antibodies. In still a further aspect, the invention provides monoclonal antibodies, antibody fragments and derivatives, all of which specifically bind to a protein of the invention and preferably, an S. saprophyticus protein. The monoclonal antibodies can be human, humanized, chimeric and/or non-human antibodies.

XI. Kits Containing Nucleic Acids. Polypeptides or Antibodies of the Invention

[0232] The nucleic acid, polypeptides and antibodies of the invention can be combined with other reagents and articles to form kits. Kits for diagnostic purposes typically comprise the nucleic acid, polypeptides or antibodies in vials or other suitable vessels. Kits typically comprise other reagents for performing hybridization reactions, polymerase chain reactions (PCR), or for reconstitution of lyophilized components, such as aqueous media, salts, buffers, and the like. Kits may also comprise reagents for sample processing such as detergents, chaotropic salts and the like. Kits may also comprise immobilization means such as particles, supports, wells, dipsticks and the like. Kits may also comprise labeling means such as dyes, developing reagents, radioisotopes, fluorescent agents, luminescent or chemiluminescent agents, enzymes, intercalating agents and the like. With the nucleic acid and amino acid sequence information provided herein, individuals skilled in art can readily assemble kits to serve their particular purpose. Kits further can include instructions for use.

XII. Pharmaceutical Compositions

[0233] The nucleic acid molecules e.g., antisense nucleic acid molecules, proteins, protein fragments, small molecules, and anti-S. saprophyticus antibodies (also referred to herein as “active compounds”) of the invention can be incorporated into pharmaceutical compositions suitable for administration. Such compositions typically comprise the nucleic acid molecule, polypeptide, small molecules, or antibody and a pharmaceutically acceptable carrier. As used herein the language “pharmaceutically acceptable carrier” is intended to include any and all solvents, dispersion media, coatings, antibacterial and antifungal agents, isotonic and absorption delaying agents, and the like, compatible with pharmaceutical administration. The use of such media and agents for pharmaceutically active substances is well known in the art. Except insofar as any conventional media or agent is incompatible with the active compound, use thereof in the compositions is contemplated. Supplementary active compounds can also be incorporated into the compositions.

[0234] A pharmaceutical composition of the invention is formulated to be compatible with its intended route of administration. Examples of routes of administration include parenteral, e.g., intravenous, intradermal, subcutaneous, oral, inhalation, transdermal (topical), transmucosal, and rectal administration. Solutions or suspensions used for parenteral, intradermal, or subcutaneous application can include the following components: a sterile diluent such as water for injection, saline solution, fixed oils, polyethylene glycols, glycerine, propylene glycol or other synthetic solvents; antibacterial agents such as benzyl alcohol or methyl parabens; antioxidants such as ascorbic acid or sodium bisulfite; chelating agents such as ethylenediaminetetraacetic acid; buffers such as acetates, citrates or phosphates and agents for the adjustment of tonicity such as sodium chloride or dextrose. pH can be adjusted with acids or bases, such as hydrochloric acid or sodium hydroxide. The parenteral preparation can be enclosed in ampoules, disposable syringes or multiple dose vials made of glass or plastic.

[0235] Pharmaceutical compositions suitable for injectable use include sterile aqueous solutions (where water soluble) or dispersions and sterile powders for the extemporaneous preparation of sterile injectable solutions or dispersion. For intravenous administration, suitable carriers include physiological saline, bacteriostatic water, Cremophor ELTM (BASF, Parsippany, N.J.) or phosphate buffered saline (PBS). In all cases, the composition must be sterile and should be fluid to the extent that easy syringability exists. It must be stable under the conditions of manufacture and storage and must be preserved against the contaminating action of microorganisms such as bacteria and fungi. The carrier can be a solvent or dispersion medium containing, for example, water, ethanol, polyol (for example, glycerol, propylene glycol, and liquid polyetheylene glycol, and the like), and suitable mixtures thereof. The proper fluidity can be maintained, for example, by the use of a coating such as lecithin, by the maintenance of the required particle size in the case of dispersion and by the use of surfactants. Prevention of the action of microorganisms can be achieved by various antibacterial and antifungal agents, for example, parabens, chlorobutanol, phenol, ascorbic acid, thimerosal, and the like. In many cases, it will be preferable to include isotonic agents, for example, sugars, polyalcohols such as mannitol, sorbitol, sodium chloride in the composition. Prolonged absorption of the injectable compositions can be brought about by including in the composition an agent which delays absorption, for example, aluminum monostearate and gelatin.

[0236] Sterile injectable solutions can be prepared by incorporating the active compound (e.g., a fragment of an S. saprophyticus polypeptide or an anti-S. saprophyticus antibody) in the required amount in an appropriate solvent with one or a combination of ingredients enumerated above, as required, followed by filtered sterilization. Generally, dispersions are prepared by incorporating the active compound into a sterile vehicle which contains a basic dispersion medium and the required other ingredients from those enumerated above. In the case of sterile powders for the preparation of sterile injectable solutions, the preferred methods of preparation are vacuum drying and freeze-drying which yields a powder of the active ingredient plus any additional desired ingredient from a previously sterile-filtered solution thereof.

[0237] Oral compositions generally include an inert diluent or an edible carrier. They can be enclosed in gelatin capsules or compressed into tablets. For the purpose of oral therapeutic administration, the active compound can be incorporated with excipients and used in the form of tablets, troches, or capsules. Oral compositions can also be prepared using a fluid carrier for use as a mouthwash, wherein the compound in the fluid carrier is applied orally and swished and expectorated or swallowed. Pharmaceutically compatible binding agents, and/or adjuvant materials can be included as part of the composition. The tablets, pills, capsules, troches and the like can contain any of the following ingredients, or compounds of a similar nature: a binder such as microcrystalline cellulose, gum tragacanth or gelatin; an excipient such as starch or lactose, a disintegrating agent such as alginic acid, Primogel, or corn starch; a lubricant such as magnesium stearate or Sterotes; a glidant such as colloidal silicon dioxide; a sweetening agent such as sucrose or saccharin; or a flavoring agent such as peppermint, methyl salicylate, or orange flavoring.

[0238] For administration by inhalation, the compounds are delivered in the form of an aerosol spray from a pressurized container or dispenser which contains a suitable propellant, e.g., a gas such as carbon dioxide, or a nebulizer.

[0239] Systemic administration can also be by transmucosal or transdermal means. For transmucosal or transdermal administration, penetrants appropriate to the barrier to be permeated are used in the formulation. Such penetrants are generally known in the art, and include, for example, for transmucosal administration, detergents, bile salts, and fusidic acid derivatives. Transmucosal administration can be accomplished through the use of nasal sprays or suppositories. For transdermal administration, the active compounds are formulated into ointments, salves, gels, or creams as generally known in the art.

[0240] The compounds can also be prepared in the form of suppositories (e.g., with conventional suppository bases such as cocoa butter and other glycerides) or retention enemas for rectal delivery.

[0241] In one embodiment, the active compounds are prepared with carriers that will protect the compound against rapid elimination from the body, such as a controlled release formulation, including implants and microencapsulated delivery systems. Biodegradable, biocompatible polymers can be used, such as ethylene vinyl acetate, polyanhydrides, polyglycolic acid, collagen, polyorthoesters, and polylactic acid. Methods for preparation of such formulations will be apparent to those skilled in the art. The materials can also be obtained commercially from Alza Corporation and Nova Pharmaceuticals, Inc. Liposomal suspensions (including liposomes targeted to infected cells with monoclonal antibodies to viral antigens) can also be used as pharmaceutically acceptable carriers. These can be prepared according to methods known to those skilled in the art, for example, as described in U.S. Pat. No. 4,522,811.

[0242] It is especially advantageous to formulate oral or parenteral compositions in dosage unit form for ease of administration and uniformity of dosage. Dosage unit form as used herein refers to physically discrete units suited as unitary dosages for the subject to be treated; each unit containing a predetermined quantity of active compound calculated to produce the desired therapeutic effect in association with the required pharmaceutical carrier. The specification for the dosage unit forms of the invention are dictated by and directly dependent on the unique characteristics of the active compound and the particular therapeutic effect to be achieved, and the limitations inherent in the art of compounding such an active compound for the treatment of individuals.

[0243] Toxicity and therapeutic efficacy of such compounds can be determined by standard pharmaceutical procedures in cell cultures or experimental animals, e.g., for determining the LD50 (the dose lethal to 50% of the population) and the ED50 (the dose therapeutically effective in 50% of the population). The dose ratio between toxic and therapeutic effects is the therapeutic index and it can be expressed as the ratio LD50/ED50. Compounds which exhibit large therapeutic indices are preferred. While compounds that exhibit toxic side effects may be used, care should be taken to design a delivery system that targets such compounds to the site of affected tissue in order to minimize potential damage to uninfected cells and, thereby, reduce side effects.

[0244] The data obtained from the drug metabolism and pharmacokinetic studies, e.g., cell culture assays and animal studies, can be used in formulating a range of dosage for use in humans. The dosage of such compounds lies preferably within a range of circulating concentrations that include the ED50 with little or no toxicity. The dosage may vary within this range depending upon the dosage form employed and the route of administration utilized. For any compound used in the method of the invention, the therapeutically effective dose can be estimated initially from cell culture assays. A dose may be formulated in animal models to achieve a circulating plasma concentration range that includes the IC50 (i.e., the concentration of the test compound which achieves a half-maximal inhibition of activity) and the minimal inhibitory concentration (MIC) as determined in cell culture. Such information can be used to more accurately determine useful doses in humans. Levels in plasma may be measured, for example, by high performance liquid chromatography.

[0245] As defined herein, a therapeutically effective amount of polypeptide (i.e., an effective dosage) ranges from about 0.001 to 30 mg/kg body weight, preferably about 0.01 to 25 mg/kg body weight, more preferably about 0.1 to 20 mg/kg body weight, and even more preferably about 0.001 to 10 mg/kg, 0.01 to 9 mg/kg, 0.1 to 8 mg/kg, 1 to 7 mg/kg, or 2 to 6 mg/kg body weight. The skilled artisan will appreciate that certain factors may influence the dosage required to effectively treat a subject, including but not limited to the severity of the disease or disorder, previous treatments, the general health and/or age of the subject, and other diseases present. Moreover, treatment of a subject with a therapeutically effective amount of a polypeptide or antibody can include a single treatment or, preferably, can include a series of treatments.

[0246] In a preferred example, a subject is treated with antibody or polypeptide in the range of between about 0.1 to 20 mg/kg body weight, one time per week for between about 1 to 10 weeks, preferably between 2 to 8 weeks, more preferably between about 3 to 7 weeks, and even more preferably for about 4, 5, or 6 weeks. It will also be appreciated that the effective dosage of antibody or polypeptide used for treatment may increase or decrease over the course of a particular treatment. Changes in dosage may result and become apparent from the results of diagnostic assays as described herein.

[0247] The present invention encompasses agents which modulate expression or activity. An agent may, for example, be a small molecule. For example, such small molecules include, but are not limited to, peptides, peptidomimetics, amino acids, amino acid analogs, polynucleotides, polynucleotide analogs, nucleotides, nucleotide analogs, organic or inorganic compounds (i.e.,. including heteroorganic and organometallic compounds) having a molecular weight less than about 10,000 grams per mole, organic or inorganic compounds having a molecular weight less than about 5,000 grams per mole, organic or inorganic compounds having a molecular weight less than about 1,000 grams per mole, organic or inorganic compounds having a molecular weight less than about 500 grams per mole, and salts, esters, and other pharmaceutically acceptable forms of such compounds. It is understood that appropriate doses of small molecule agents depends upon a number of factors within the ken of the ordinarily skilled physician, veterinarian, or researcher. The dose(s) of the small molecule will vary, for example, depending upon the identity, size, and condition of the subject or sample being treated, further depending upon the route by which the composition is to be administered, if applicable, and the effect which the practitioner desires the small molecule to have upon the nucleic acid or polypeptide of the invention.

[0248] Exemplary doses include milligram or microgram amounts of the small molecule per kilogram of subject or sample weight (e.g., about 1 microgram per kilogram to about 500 milligrams per kilogram, about 100 micrograms per kilogram to about 5 milligrams per kilogram, or about 1 microgram per kilogram to about 50 micrograms per kilogram. It is furthermore understood that appropriate doses of a small molecule depend upon the potency of the small molecule with respect to the expression or activity to be modulated. Such appropriate doses may be determined using the assays described herein. When one or more of these small molecules is to be administered to an animal (e.g., a human) in order to modulate expression or activity of a polypeptide or nucleic acid of the invention, a physician, veterinarian, or researcher may, for example, prescribe a relatively low dose at first, subsequently increasing the dose until an appropriate response is obtained. In addition, it is understood that the specific dose level for any particular animal subject will depend upon a variety of factors including the activity of the specific compound employed, the age, body weight, general health, gender, and diet of the subject, the time of administration, the route of administration, the rate of excretion, any drug combination, and the degree of expression or activity to be modulated.

[0249] The nucleic acid molecules of the invention can be inserted into vectors and used as gene therapy vectors. Gene therapy vectors can be delivered to a subject by, for example, intravenous injection, local administration (see U.S. Pat. No. 5,328,470) or by stereotactic injection (see e.g., Chen et al. (1994) Proc. Natl. Acad. Sci. USA 91:3054-3057). The pharmaceutical preparation of the gene therapy vector can include the gene therapy vector in an acceptable diluent, or can comprise a slow release matrix in which the gene delivery vehicle is imbedded. Alternatively, where the complete gene delivery vector can be produced intact from recombinant cells, e.g., retroviral vectors, the pharmaceutical preparation can include one or more cells which produce the gene delivery system.

[0250] The pharmaceutical compositions can be included in a container, pack, or dispenser together with instructions for administration.

XIII. Methods of Treatment

[0251] The present invention provides for both prophylactic and therapeutic methods of treating a subject at risk of (or susceptible to) a disorder or having a disorder associated with aberrant or unwanted S. saprophyticus nucleic acid expression or polypeptide activity.

[0252] With regards to both prophylactic and therapeutic methods of treatment, such treatments may be specifically tailored or modified, based on knowledge obtained from the field of pharmacogenomics. “Pharmacogenomics”, as used herein, refers to the application of genomics technologies such as gene sequencing, statistical genetics, and gene expression analysis to drugs in clinical development and on the market. More specifically, the term refers the study of how a patient's genes determine his or her response to a drug (e.g., a patient's “drug response phenotype”, or “drug response genotype”). Thus, another aspect of the invention provides methods for tailoring an individual's prophylactic or therapeutic treatment with either the S. saprophyticus polypeptide molecules of the present invention or S. saprophyticus polypeptide modulators according to that individual's drug response genotype. Pharmacogenomics allows a clinician or physician to target prophylactic or therapeutic treatments to patients who will most benefit from the treatment and to avoid treatment of patients who will experience toxic drug-related side effects.

[0253] (A) Prophylactic Methods

[0254] In one aspect, the invention provides a method for preventing in a subject, a disease or condition associated with an aberrant or unwanted S. saprophyticus nucleic acid expression or polypeptide activity, by administering to the subject an agent which modulates S. saprophyticus nucleic acid expression or at least one S. saprophyticus polypeptide activity. Subjects at risk for a disease which is associated with, caused or contributed to infection by S. saprophyticus can be identified by, for example, any or a combination of diagnostic or prognostic assays as described herein. Administration of a prophylactic agent can occur prior to the manifestation of symptoms characteristic of the S. saprophyticus-associated disease or disorder, such that a disease or disorder is prevented or, alternatively, delayed in its progression. For example, an S. saprophyticus polypeptide agonist or an S. saprophyticus polypeptide antagonist agent can be used for treating the subject. The appropriate agent can be determined based on screening assays described herein.

[0255] (B) Therapeutic Methods

[0256] Another aspect of the invention pertains to methods of modulating S. saprophyticus nucleic acid expression or polypeptide activity for therapeutic purposes, e.g., to treat an S. saprophyticus-associated disease or disorder, e.g., to reduce or ameliorate S. saprophyticus infection in a subject. Accordingly, in an exemplary embodiment, the modulatory method of the invention involves contacting a bacterial cell expressing an S. saprophyticus polypeptide or a host tissue which is infected with S. saprophyticus with an agent that modulates one or more of the activities of an S. saprophyticus polypeptide activity, such that an S. saprophyticus polypeptide activity is modulated or S. saprophyticus bacteria is killed, or there is a reduction in bacterial growth, e.g., either by the host immune system or by direct action of the agent. An agent that modulates an S. saprophyticus activity can be an agent as described herein, such as, an S. saprophyticus antibody, an S. saprophyticus polypeptide agonist or antagonist, a peptidomimetic of an S. saprophyticus polypeptide agonist or antagonist, vaccine, or other small molecule. In one embodiment, the agent stimulates one or more S. saprophyticus polypeptide activities. Examples of such stimulatory agents include active S. saprophyticus polypeptide and a nucleic acid molecule encoding S. saprophyticus that has been introduced into the cell. In another embodiment, the agent inhibits one or more S. saprophyticus polypeptide activities. Examples of such inhibitory agents include antisense S. saprophyticus nucleic acid molecules, anti-S. saprophyticus antibodies, small molecules, and S. saprophyticus polypeptide inhibitors. These modulatory methods can be performed in vivo (e.g., by administering the agent to a subject). As such, the present invention provides methods of treating an individual afflicted with a to treat an S. saprophyticus-associated disease or disorder, e.g., to reduce or ameliorate S. saprophyticus infection in a subject. In one embodiment, the method involves administering an agent (e.g., an agent identified by a screening assay described herein), or combination of agents that modulates (e.g., upregulates or downregulates) S. saprophyticus nucleic acid expression or polypeptide activity.

[0257] This invention is further illustrated by the following examples which should not be construed as limiting. Furthermore, all references, Accession Numbers, sequences, patent applications, patents, and published patent applications, cited throughout this application are hereby incorporated by reference.

### EXAMPLES

### Example 1

### Experimental Design and Methods

Random Sequencing Strategy and Library Construction.

[0258] The overall approach to sequencing bacterial genomes has been well established since first described by Fleischmann et al. (Science 269:449-604, 1995). The theory of the approach is centered behind the Lander and Waterman (Genomics 2:231-239, 1988) hypothesis of a Poisson distribution that describes the probability that any given base will not be sequenced after a certain amount of random sequence has been generated. Typically, five to six fold coverage of a genome sequenced randomly yields<1% of the total genome unrepresented.

[0259] Chromosomal DNA from a recent clinical isolate of Staphylococcus saprophyticus (given the strain name of ARC 1259) was prepared from a fresh overnight culture that had been incubated at 37° C. on blood agar plates. The strain had been purified from a single colony to ensure purity. Bacterial colonies were collected and processed using a commercial genomic DNA isolation kit (Promega). The precipitated chromosomal DNA was washed extensively with ethanol to remove contaminating salts. Two libraries containing random DNA fragments of S. saprophyticus ARC 1259 were generated for the random sequencing phase. These libraries were constructed with different average size random inserts in order to help anchor the subsequent sequences. The first library contained inserts averaging 1,500 base pairs, while the inserts of the second library averaged 3,000 base pairs. The plasmid DNA from representative colonies of these libraries was produced and sequenced according to routine molecular biological protocols. For both libraries, approximately 1,000 reactions were initially run and examined to ensure that the libraries contained random inserts as expected. A total of 22,351 reactions were run to generate the random sequence, and these reactions averaged 771 base pairs per reaction. With a predicted genome size of 2.4 Mb for S. saprophyticus this represented a 6.4 fold coverage.

Assembly and Informatics

[0260] Base calls and quality scores were determined using the program PHRED (Ewing et al., Genome Res. 8: 175-185, 1998; Ewing and Green, Genome Res. 8: 685-734, 1998). Reads were assembled using PHRAP (P. Green, Abstracts of DOE Human Genome Program Contractor-Grantee Workshop V, January 1996, p. 157) with default program parameters and quality scores and viewed and corrected using Consed (Gordon et al., Genome Res. 8:195-202, 1998). After the initial assembly, the random sequences were condensed into 247 independent contigs. An initial attempt to order these contigs and close some of the physical gaps was performed. The terminal 1,000 base pairs from each end of every contig were used to search non-redundant protein databases to identify the presence of orthologous peptide sequences using the BLAST algorithm (Altschul et al., J. Mol. Biol. 215:403-410, 1990). If two independent contigs contained fragments of the same protein sequence from the database in a suitable way, then it was suggestive that these contigs were linked. To determine the intervening sequence, oligonucleotide primers were designed from the contig ends to amplify a DNA product using the polymerase chain reaction (PCR) from S. saprophyticus ARC 1259 genomic DNA. The reaction conditions were as follows: 50 ng of genomic DNA, 3.2 pmol of each primer and 48 ul of diluted High-Fidelity PCR Master Mix (Roche) were combined in a 96-well plate. Thirty cycles consisting of 60 seconds at 94° C. for denaturation, 60 seconds at 52° C. for primer annealing and 3 minutes at 72° C. for extension were carried out in a 96-well plate on a Perkin Elmer GeneAmp 9600 machine. The resulting PCR products were purified using the PCR Clean-up Kit (EDGE Biosystems) and sequenced using the amplification primers on an ABI 3100 DNA sequencer using Big Dye Terminator Cycle sequencing Kit (v.3.1). These sequences, which closed the physical gaps between specific contigs, were then incorporated into the PHRAP-based assembly.

[0261] Once the number of contigs had been reduced, putative open reading frames (ORFs) were identified. Stretches of DNA that possessed a suitable translational intitiation codon (AUG, GUG or CUG) and did not contain a translational termination codon for a minimum of 33 triplet codons were identified and called putative ORFs. The predicted protein sequences of these putative ORFs were used to search non-redundant protein databases to identify whether they displayed any homology to proteins from other bacterial species. All the ORFs and their homology searches were then visually inspected.

### Example 2

### Construction and Operation of DNA Microarrays

[0262] The sequences of the invention may additionally be used in the construction and application of DNA microarrays (the design, methodology, and uses of DNA arrays are well known in the art, and are described, for example, in Schena, M. et al. (1995) Science 270: 467-470; Wodicka, L. et al. (1997) Nature Biotechnology 15: 1359-1367; DeSaizieu, A. et al. (1998) Nature Biotechnology 16: 45-48; and DeRisi, J. L. et al. (1997) Science 278: 680-686).

[0263] DNA microarrays are solid or flexible supports consisting of nitrocellulose, nylon, glass, silicone, or other materials. Nucleic acid molecules may be attached to the surface in an ordered manner. After appropriate labeling, other nucleic acids or nucleic acid mixtures can be hybridized to the immobilized nucleic acid molecules, and the label may be used to monitor and measure the individual signal intensities of the hybridized molecules at defined regions. This methodology allows the simultaneous quantification of the relative or absolute amount of all or selected nucleic acids in the applied nucleic acid sample or mixture. DNA microarrays, therefore, permit an analysis of the expression of multiple (as many as 6800 or more) nucleic acids in parallel (see, e.g., Schena, M. (1996) BioEssays 18(5): 427-431).

[0264] The sequences of the invention may be used to design oligonucleotide primers which are able to amplify defined regions of one or more S. saprophyticus genes by a nucleic acid amplification reaction such as the polymerase chain reaction. The choice and design of the 5′ or 3′ oligonucleotide primers or of appropriate linkers allows the covalent attachment of the resulting PCR products to the surface of a support medium described above (and also described, for example, Schena, M. et al. (1995) Science 270: 467-470).

[0265] Nucleic acid microarrays may also be constructed by in situ oligonucleotide synthesis as described by Wodicka, L. et al. (1997) Nature Biotechnology 15: 1359-1367. By photolithographic methods, precisely defined regions of the matrix are exposed to light. Protective groups which are photolabile are thereby activated and undergo nucleotide addition, whereas regions that are masked from light do not undergo any modification. Subsequent cycles of protection and light activation permit the synthesis of different oligonucleotides at defined positions. Small, defined regions of the genes of the invention may be synthesized on microarrays by solid phase oligonucleotide synthesis.

[0266] The nucleic acid molecules of the invention present in a sample or mixture of nucleotides may be hybridized to the microarrays. Alternatively, fragments of the nucleic acid molecules of the invention, e.g., oligonucleotides of about, for example, 40-100 nucleotides from each of the gene or segment of a gene of the invention may be hybridized to the microarrays. The nucleic acid molecules can be labeled according to standard methods. In brief, nucleic acid molecules (e.g., RNA, including, but not limited to, mRNA or rRNA molecules or DNA molecules, including, but not limited to, cDNA molecules) are labeled by the incorporation of isotopically or fluorescently labeled nucleotides, e.g., during reverse transcription or DNA synthesis. Hybridization of labeled nucleic acids to microarrays is described (e.g., in Schena, M. et al. (1995) supra; Wodicka, L. et al. (1997), supra; and DeSaizieu A. et al. (1998), supra). The detection and quantification of the hybridized molecule are tailored to the specific incorporated label. Radioactive labels can be detected, for example, as described in Schena, M. et al. (1995) supra) and fluorescent labels may be detected, for example, by the method of Shalon et al. (1996) Genome Research 6: 639-645).

[0267] The application of the sequences of the invention to DNA microarray technology, as described above, permits comparative analyses of different strains of S. saprophyticus. For example, studies of inter-strain variations based on individual transcript profiles and the identification of genes that are important for specific and/or desired strain properties such as pathogenicity are facilitated by nucleic acid array methodologies. The DNA microarrays described herein may also be used to determine or confirm mechanism of action of an inhibitor, e.g., a small molecule inhibitor, or to identify an inhibitor, e.g., a small molecule inhibitor, of S. saprophyticus nucleic acid expression or polypeptide activity.

### Example 3

### Analysis of the Dynamics of Cellular Protein Populations (Proteomics)

[0268] The genes, compositions, and methods of the invention may be applied to study the interactions and dynamics of populations of proteins, termed ‘proteomics’. Protein populations of interest include, but are not limited to, the total protein population of S. saprophyticus (e.g., in comparison with the protein populations of other organisms), those proteins which are active under specific environmental or metabolic conditions, or those proteins which are active during specific phases of growth and development.

[0269] Protein populations can be analyzed by various well-known techniques, such as gel electrophoresis. Cellular proteins may be obtained, for example, by lysis or extraction, and may be separated from one another using a variety of electrophoretic techniques. Sodium dodecyl sulfate polyacrylamide gel electrophoresis (SDS-PAGE) separates proteins largely on the basis of their molecular weight. Isoelectric focusing polyacrylamide gel electrophoresis (IEF-PAGE) separates proteins by their isoelectric point (which reflects not only the amino acid sequence but also posttranslational modifications of the protein). Another, more preferred method of protein analysis is the consecutive combination of both IEF-PAGE and SDS-PAGE, known as 2-D-gel electrophoresis (described, for example, in Hermann et al. (1998) Electrophoresis 19: 3217-3221; Fountoulakis et al. (1998) Electrophoresis 19: 1193-1202; Langen et al. (1997) Electrophoresis 18: 1184-1192; Antelmann et al. (1997) Electrophoresis 18: 1451-1463). Other separation techniques may also be utilized for protein separation, such as capillary gel electrophoresis; such techniques are well known in the art.

[0270] Proteins separated by these methodologies can be visualized by standard techniques, such as by staining or labeling. Suitable stains are known in the art, and include Coomassie Brilliant Blue, silver stain, or fluorescent dyes such as Sypro Ruby (Molecular Probes). The inclusion of radioactively labeled amino acids or other protein precursors (e.g., ³⁵S-methionine, ³⁵S-cysteine, ¹⁴C-labelled amino acids, ¹⁵N-amino acids, ¹⁵NO₃ or ¹⁵NH₄⁺ or ¹³C-labelled amino acids) in the medium of S. saprophyticus permits the labeling of proteins from these cells prior to their separation. Similarly, fluorescent labels may be employed. These labeled proteins can be extracted, isolated and separated according to the previously described techniques.

[0271] Proteins visualized by these techniques can be further analyzed by measuring the amount of dye or label used. The amount of a given protein can be determined quantitatively using, for example, optical methods and can be compared to the amount of other proteins in the same gel or in other gels. Comparisons of proteins on gels can be made, for example, by optical comparison, by spectroscopy, by image scanning and analysis of gels, or through the use of photographic films and screens. Such techniques are well-known in the art.

[0272] To determine the identity of any given protein, direct sequencing or other standard techniques may be employed. For example, N- and/or C-terminal amino acid sequencing (such as Edman degradation) may be used, as may mass spectrometry (in particular MALDI or ESI techniques (see, e.g., Langen et al. (1997) Electrophoresis 18: 1184-1192)). The protein sequences provided herein can be used for the identification of S. saprophyticus proteins by these techniques.

[0273] The information obtained by these methods can be used to compare patterns of protein presence, activity, or modification between different samples from various biological conditions.

Equivalents

[0274] Those of ordinary skill in the art will recognize, or will be able to ascertain using no more than routine experimentation, many equivalents to the specific embodiments of the invention described herein. Such equivalents are intended to be encompassed by the following claims.

The application's sequence listing, which the Patent Office published only in electronic form, follows.

SEQUENCE LISTING (63 sequences)

SEQ ID NO: 1 - DNA, 1535 bp, Staphylococcus saprophyticus
attcttttaagtttatactttggcggttgtggcgaagtggttaacgcatcggattgtggttccgacactcgtgggttcgattcccatcatccgccccataatcgttaaagtgcgggtgtagtttaatggcaaaacctcagccttccaagctgatgttgtgggttcgattcccatcacccgctccattttaattattccacagtagctcagtggtagagctatcggctgttaaccgatcggtcgtaggttcgagtcctacctgtggagccatggccccgtggtcaagcggttaagacaccgccctttcacggcggtaacacgggttcgagtcccgtcggggtcatataaacagaagtgaattatcgcttctgtttttttatatggagagttgtccgagttggccgaaggagcacgcctggaaagtgtgtaggcgccacaagcgtctcgagggttcgaatccctcactctccgctaataatagatgcctcgttattctaaacttattaaagtgttgaataacgaggttttttattagtttaaataatgagttgaacgaaaataaaattagggtctgatttacaaatcttgtatatttatagcagatatccaaaataagtttgtcaacgctttaatagtggtaaaatatcaacgattgcaagtattattttttatttttaattaatttaaagataaatcacttcgtttaaaaagatatggaggttcattcatggataatcgaatagactattatgaaatcgcaaaagaagaacttgggttaattatggatttagagaaacaattgaaaaaacatcgatagatagaaaactacgtgaattgattaaaatacgcgtctcacaaatcaatggttgtgcattttgtattggcatgcatactgcagatgctagaaaaatgaaggtttcagaagaagaaatatatttattaaatgcttgggatgatacgaatgttttttctgaaaaagcaaagttagcatttaaattagcagaagcaattacacatatctctaaaaatggtgtgccagataaactgtatgatgaggtacgtacatcattctctgaagaagaatatacagatttagtattaattattaatcaaattaatatgtggaatagactatccatttctatgggtgatcaacaccttatatagtaagtcttaggattaaaggcatccaggcaatttatggatgcttttttattttgtggtcatcgtggtaatgttaacgtgtttacctttaattataacatttgagtttaatagattatttgttgttgatgtgcagacactgttaaataagactaaacacgttataatgagtatgagatggaggaatgatgaagtggatttttggttaaaacaacaggcgcaacaaaagggtgaacatatatttattgatgatggtgaaacgcaagtcacgtttgcgacaatgtacgacagagcttcaaaacttgcttgtactttacatcagttaaataaaaagagaataggcttttatattgataatactattgaatctg

SEQ ID NO: 2 - DNA, 1592 bp, Staphylococcus saprophyticus
gatattcaggctttccgatgcgccacacccgcaatgattagcatgataccggcgataggtttcaaactgctacctaaagcatctcgaattttttgtgtgtcgcgatgttttaaatagccgagaacgataatggcataaagcacacccacaaacatggacgatgattgggcttccgaagaattcgaaaatcttgtattgtaatgttttttctccaaaaaagataccagcaatggcatgtaataacatcataatcactggaactaatatagtagaaaaggctatgaatgttgatggtgcttgggtgttttcattgatgtcgttcgaatattgatttaacaaatcttgatttggcttcacagataatcgcggtgtgataaatttaccgtaaagtggaccagcgatgataatggttggaatcgcacatatgacaccaagtaccatagttatcccgatattcgcaccaaactgattcactgaaatcagtgggccaggatgtggtggcaccataccatgcatcgttgctaatgcagcaataacaggcacaccgatagctacataggcagatcctttcattttatgttcatcttctaattttttagcaattgtaaaaatcagtggcagtagcataatcaatccaacttcgaaaaacattggaatcccaataataaacgcagctaacgccatcatccatggcaattttttgtaagacgcattctgtaatatcgaagatgcaattttgtcgctggcacctgaatcagaaagtatcttacctagcatggcacctagcgcgatggttacgcccgtttcaccgagtgttgaaccagccccagtttctatagattcaacaattttatcaatgtctaatccagaagtgaaaccgacaaagattgcggttagtagtaatgcaagtagtggatggaattttaattttgaagtgattaaaaagatgagaaataaaatacttatcactgtaataatcaatagttgatagtcttgtgttgtcacttgaagctcccccttatgtatagtatcgatatagaacgatttgtgtttatcgataaaatatatataaatatgatttattaaaaaaattaattcagactatgagattcattttaaaacaaattaatcataatgacaataaaccgctttcattataataataggaaaggtgaatgagttgattaaatatcttatatattcttgcaattatatatatttggtgtatgattaaagtgaattattacacttttgtcaatagggaaatacaaactaaggggtgatttagaaataattcatttattttcttatagaaatcgtatccattgtatgtgtctatatcatatgtaaatgtaactttgcttaggggttctttctcgtaatatgaaagttaacttgctaatagggatgaattgatgtactagtgtttgaatgcattatgtattgctcatgtttcgccaaaagggattcaaaaaatgaggagtgatttattatgcgtaaagtaggaaaattactttcagcaaccgtcgttgtatcaacacttgtcgtcggatcttcagcagcttattttcaacgaatagtacggatacaca

SEQ ID NO: 3 - DNA, 2845 bp, Staphylococcus saprophyticus
  misc_feature (2767)..(2767): n is a, c, g, or t
cagattcagcatcagtaagtgaatctgactcagcattttaaccgaatcaaatagtgcgtcaacaagtgcgagcgactcagcatcagtaagtgaatcagattcagcgtcagtaagtgcatcagattcagcgtcagtaagcgcatctgactcagcgtcagtaagtgaatctgactcagcgtcagtaagcgcatctgactcagcgtcagtaagtgaatcagatagtgcgtcaacaagtgcgagcgactcagcatcagtaagtgaatctgactcagcgtcagtaagcgcatctgactcagcatcagtaagtgaatcagatagtgcgtcactaagcacaagtgaatcagatagtgcgtcaacaagtgcgagcgactcagcatcagtaagtgaatcagattcagcgtcagtaagtgaatcagatagtgcgtcaacaagtgcgagcgactcagcatcagtaagtgaatctgactcagcatcagtaagtgaatctgactcagcgtcagtaagcgcatctgactcagcatcagtaagtgaatcagatagtgcgtcactaagcacaagtgaatcagatagtgcgtcaacaagtgcgagcgactcagcatcagtaagtgaatcagattcagcgtcagtaagtgcatcagattcagcatcagtaagtgaatctgactcagcatcagtaagtgaatcagatagtgcgtcaacaagtgcgagcgactcagcgtcagtaagtgaatcagatagtgcgtcaacaagtgcgagcgactcagcatcagtaagtgaatcagattcagcgtcagtaagtgcatcagattcagcatcagtaagtgaatctgactcagcatcagtaagtgaatcagattcagcgtcagtaagtgcatcagattcagcgtcagtaagcgcatctgactcagcgtcagtaagtgaatctgactcagcgtcagtaagcgcatctgactcagcgtcagtaagtgaatctgactcagcgtcagtaagcgcatctgactcagcatcagtaagtgaatcagatagtgcgtcactaagcacaagtgaatcagattcagcgtcagtaagtgcatctgactcagcatcagtaagtgaatcagatagtgcgtcactaagcacaagtgaatcagatagtgcgtcactaagcacaagtgaatcagattcagcgtcagtaagcgcatctgactcagcgtcagtaagtgaatcagatagtgcgtcaacaagtgcgagcgactcagcatcagtaagtgaatctgactcagcatcagtaagtgaatctgactcagcatcagtaagtgaatcagattcagcgtcagtaagtgcatcagattcagcatcagtaagtgaatctgactcagcatcagtaagtgaatcagattcagcgtcagtaagtgcatcagattcagcatcagtaagtgaatctgactcagcgtcagtaagtgcatcagattcagcgtcagtaagcgcatctgactcagcgtcagtaagtgaatctgactcagcgtcagtaagcgcatctgactcagcatcagtaagtgaatcagatagtgcgtcaacaagtgcgagcgactcagcatcagtaagtgaatctgactcagcgtcagtaagtgaatcagatagtgcgtcaacaagtgcgagcgactcagcatcagtaagtgaatcagattcagcgtcagtaagtgaatcagatagtgcgtcaacaagtgcgagcgactcagcgtcagtaagtgaatcagatagtgcgtcaacaagtgcgagcgactcagcatcagtaagtgaatcagatagtgcgtcactaagcacaagtgaatcagattcagcgtcagtaagtgcatctgactcagcatcagtaagtgaatcagatagtgcatcactaagcacaagtgaatcagattcagcgtcagtaagcgcgtctgactcagcgtcagtaagtgcttcagatagtgcgtcaaatgtcaattcgaatgcaacttctaacagtacatcaactgaagaaagtagaaacgcatctaatgtagcccaacaatcaagtcacaaagataatagtgatgaaaataaagaacttcctgaaactggtaatagcaatgatgctaataatacaaacagattaatgggagctgttctctcattacttgctggattaggtttaataaaaagatcacgtaaaaataaagaagataaaaataataatagattttaatctataataatatgaagtaaaacaaagaggctaagacataatgttgaatttacatgatagtaaatcaactatgtttttagcctctttgcactcatattaaaatataagaattttaggtgaaaatatgttaaaaaataaagaattcaagattttacacaaaagaattatttttacaatgttcattctttttatatatatacttggaagtaatatttctatcattggtaatgaatcaattaaatccaacggaaataaaagaaatgacggattttgtcattaaacgtgtttattcacttggtaagtcaacccaacagtggactaaaaaagtagatttcgataaagagtatcaaagtttagtagatagtatcattaaagttgacgcaattatgaatgcaaataatgatagagtcgaacatgaaatagatattcgtgtaccaatttatggacatcgcatgttgaaaaacttgacgttagattcttttatatttagaaatacaatacgctacacagtcattatggcaatttctatttttattgctttaatgtttgattttgaaaaagcctacntggatacctttgagtacacatacagtcttactaggctctacaacactgcatagcttgaaagagctgggtcaaatcact

SEQ ID NO: 4 - DNA, 786 bp, Staphylococcus saprophyticus
agtcattgcaggaccgatccgcgctggggctgtcggcgctcggctggatcaccttcctcgcgctctgggcgatccaggtcctcatcgtcagctacggcatgcacgtgatccgcaagtacatggcgatcgccgcaccgaccaccctcatcacgatgtccgcgctggcgatctggatgttcctccgggcgggcggttccatctccttctccaccgcgcagccgctcaccggcggggcgatgtggctgcagatcctgcagggtgccgcgctctgggtcgtgatctacgggacgttcgtgctgaacttctgcgacttcacgcgcgcggccaagagccgccggtcgatcgtgcgcgggaacctcgtcgggattccggtgaacatgctgctgttcgcagccatcgtcgtcgttctcggcggcgcgcagttcgaactggacggacgggtgatcaccagcccgaccgacatcgtccagacgattcccaacctggtgatgctggccagcgcctcggtcgccctggtcgtcctgacgatcgcggtgaacctgctggccaacttcgtcgcaccgatctacgtgctggtcaacctcttcccgcggacgctgaacttccgccgggcggggctggtgagcgccgtcatcggcctggtcatcctgccctggaacctctacgacagccccgtggtcgtgaactacttcctcagcggcctcggtgcgctgctcggccccgttttcggcgtcatcatggcggactactggttgctgcggaaggggcgcgtcaacgtcccggaac

SEQ ID NO: 5 - DNA, 3180 bp, Staphylococcus saprophyticus
cgttaagtgcaagtgagtcgttaagcgaaagtgaatcattgagtgagagtgagtcattaagcgaatctgagtcgttaagtgccagtgagtcattaagcgagagtgaatcgttaagtacgagtgaatcattgagtgagagcgagtcgttaagtggatctgaatcgttgagcgcaagtgaatcaataagtgaaagtgaatcaataagtgaaagtgagtcgttaagtgccagtgagtcattgagtgccagtgagtcattgagtgagagtgaatcgttaagtgagtcagagtcattaagcacgagtgagtcgttaagtgaaagcgagttattaagcgatagcgaatcattgagtgagagcgagtcattaagtgccagtgagtcattgagtgccagtgagtcattgagtgccagtgagtcattgagtgccagtgagtcattaagtgaaagtgagtcagagtcattaagtgagagtgaatcaataagtgaaagtgagtcattgagtgagagtgaatcgttaagtgagtcagagtcattaagtgagagtgaatcgttaagcgaaagcgagtcattgagtacgagtgagtcattaagtgagagcgaatcgttgagtacgagtgaatcaataagtgcaagtgagtcattgagtgagagtgaatcgttaagtgagtcagagtcattaagtgagagtgagtcattgagtgaaagcgaatcattgagtacgagtgagtcattgagtgaaagtgaatcgttaagtgaaagcgaatcgttgagtgccagtgaatcattgagtgccagcgaatcattgagtgagtcagagtcattaagtgagagtgagtcactaagtgagagtgagtcattgagcgatagcgagtcattaagtgagagtgaatcattgagcacaagtgaatcattaagtgccagcgagtctttaagtgaatccgagtcacttagtacaagtgaatcaataagtgaaagcgaatcgttgggtgccagtgagtcaataagtgagtacgaatcattaaatagacacctaaataatgatggaaactatgaaaaagagaaagataaattaccagatacaggtaatgaagataaacataatgggttgataccattacttactgcgcttggaggaatcatactccttagaagacgtagaaataatgaaattcaagataaataaaaaagagcctgcactttcaaaaatagaaagtgcaggctcttatattaatattctaattttttgaacattttcaaacctactaagtagcaaatgactgagtacaatagagttgttaatatcattaaacctagttttgttagtaagtctgaaggcgtaatcgcatgatcataaccatttggaaataaatatttgagtccatgaatcattggtgcgataaccataaacataagtaaaacaataacgcttaaaatattaaatccagtagacaatttcatagataacatgactgaaaagcatattgcaattaaagtaatgcagaaaataccgacgatacataatattgtactgtaattagtttcgtgaacattcgataagaaagcaccggaagcataatcatattgatgtatatacgtaaaatacaaaatttcagaagacacaaataatattacataatatattatatacatagagaataaggcgactaactttgaattatatagacgtattcggctgatatctttataaaagattaatctaccagattcatattcttcaaaaaataaataactgacaaaatatgtcataagaatcaatggtacggcaaattgagattgtgcaagtaaaataacaaaataaaattctaaaccagagagtgaattcgtctctcctccaatttgcataaaattggtaggtagtataagtgtgattaaatataaaaatggataaagtgctattgcataaaagataattgcagagttacgcgaagatactgtagtgaaaatatttttaattaacatatcatcatttcctttcgaactcatcgaaatattgatataagttatcttgttcattaatcgtgttttctaaagtgtagtatttaactaaataatttatgatttcattatactcttcagaacctgactgcatgataactgctttttcctcaatatcttttattgtagaaaacaaattgagaagttcctgacgatgttctggatatatttgttcttttactacaatttttatcaattgttctttattgaaatcaatattttggagttttccttcttttaaaagaacaaagcgatcacagacttctgctaattcatttaattgatgactagaaataagtaatgcggttccttttttactagcccaagttcttaacgagtgaatgagcgtattaacaccgtctggatccagaccaacaaaaggttcatccataatagctatttcaggttcatcaactaaacacatagctagtgataaacgttgtttcataccaaaagaaaaatcttttacctttttgccatatgtatgtgataaacctacgagatctaatatattatcgatattttttaagtactgcgttttatgattaacttttaaataataagttaaattctttttagctgaaaagtgtttgaaatgaaccgtatcaatcatgatacctacatttttaagtatattatgatgttggaaaatatctatgccatttaaaaatatagcacctgaagtaggtcgttttgttttagcaatcattttcataagtgttgttttacctgcgccgttttttccaattaaacctacgacttctccacggtttatggttaatgaaacaccgtcaataacattaaaatcggctcctttaaaacgtttataaaggtcatctatttttaacataatgtcctcctttgaactaatagagttttaatgaaacttatatgaattgttgatgttacgcttatataagttaattttaacaacgaaaatgaatttgttcaatatagtaaataagttgttttattaaaaatttatgtattctacttacaatttaatttatatatttttagtttatagaaaaagggatttactagatttttgaaatcgcaattgacaatgatttttaaggagagtatgatagataacggtataaggggtgtactattcaaaagatatgatctatccctcatcaatttgaatagtaaacaatagccta

SEQ ID NO: 6 - DNA, 4531 bp, Staphylococcus saprophyticus
  misc_feature (1302)..(1302): n is a, c, g, or t
  misc_feature (1380)..(1380): n is a, c, g, or t
caaaaaccaggagaaacgagattagatttaattgaaaagaatacaaaaatatttaaatcgattgtttctgaagttatggcatctggatttaatgggattttcttagtagccactaaccctgttgatgtacttacctatgtaacgcaacaagtttctggattacctaaagaaaaagtaattggatcaggtacgattttagatacggcacgattcaaatatgaattagctgaagaatttggcgtttctgatagaagtgttcatggacaaatcattggggaacatggagactctgaactagctgtttggtcacaagcaaatattgcaggacagccattataccaattgttaatagatgatcctgaaaaacaacatagaatagaagaaatatttgttaatacacgagatgcagcctatgacattattcaagctaaaggtgcaacatattatggcattgctatgggattagtgcatataactaaagcgattttaaataatcaaaatgtagtgcttaccgtatccagtcgtttagaaggtgaatatggtcaagaagatgtctatataggtgtccctacaaaaattaacagacaaggtgcggtagaagtttttgaaataccgttaaacgatgaagaaaaaactttatttacccgttctgttggtattttgaaagaaatgcaaaataaaatatctcatttaattgcataattcatagtttaaatttaaactgtatataagattaattttattaaaaattctaatatttattcagtatagaatttattttacagtgattgatgatttttttgaaattaattttacatgtttaaactttatactatgattgggggattacactatggggaagacatttactgaaaaagtggatggcgttttgcaattagaatctgtgttgaaagatatcgaggatatttttgacaaagttcaaaagcaatataaaatgtcaaaagaagaaattttaatccttttgacactttggaaagaagggtcaatgactttaaaagaaatggatgattttgttcatattaaatcatacaaacgtacacgtacgtacaatgatttagttgaaaaagcgtggattattaaagaaagaccacaaaacgacgaacgtacagttattatccattttaatgaagatttaaaagatcaaagggaaagtcttttaaacttttttaaagaagaaattgattctaactcatctactattcaaaacagtcttaaatctatcttaaatctataggaattatgaatttttcaaagggatttacacaaaaaagctgccaacanagtttaaatactttatttggcagctttttattttttaaagcgtgtgctttaggaaaactaaatgatagaatttatctnttttctatcgcacaaataaatggtggattattttgttgattgataaattgatattttagaatatgtgctttattttgatcgaattgttccaaataatctagaatagcatctcgctccaatttgccttcatcatggccatgataaataacaagaataatgatgccttctatggataaaatattaaatattgcatttatggcagcaattgtactttcggcttgtgtaacaatggatttatctccttttggtaaataacctaagttaaaaatcgctgcgtcaattttaccttgttgataatttggaatatatgattggatatttgcatggctatcttgaacgatagtgacattgttaaaatcatgaatcttaagttgtgtctgcttaatagcttcatcttgtatatcaaaagcatagacattaccgtttggaacttgttgggcaagaaaatgtgtatcattaccgttaccgcatgtagcatcgatcacgatactgtcatctgatacgtgttgttgaattaatgttctagcaaaagggagaatgcgttcaagtttcatgacttaactgtgctttcaaaatatttcccttggtatgaatctcggtgagcaagttcattatcaatttcattgagaacttcccatttgttaacactccacataggacctaccattaaatcgattggaccatcaccggtaattctatgaacgatcatttcttttggtatgatttctaactgatcacacactaatttagtgtattcatcttgtgacataaattctagcatgcctttatcatattgcttaaccattggcgttccttttaataggtgaagtaaatgtatttttataccttgtacatccatttgagcgacttctcgtgcagtttccatcatcatattataatcttcaccaggtaaaccatttataatatgagtacaaatgtttatattatgtttgcgtagtttggcaataccttcataataagttttcatatcatgtgcgcgattgattaaatcagatgtttcttggtgtattgtttgaagacctagttcaacccataagtaagtacgttcattcaattctgctaaatactcgactacatcatcaggtaaacagtctggacgtgtacctatggataaaccaactacaccaggctctttcaatgcagtttcatatttttcacgcaatacctctacgggtgcatgtgtatttgtaaaagcttggaagtaggcgatgtattggccatcgtgccatttttcatgcattctatcttttatttctttaaattgtacatcgattggatctacacgattacctgcaaagtcaccgctaccagctgctgaacaaaatgtacagccaccatgtgcaacggtaccatctctatttggacaatcaaatcctccatcaattgcaactttaaatattttttgtccaaatttattttttaaatgataattccatgtatgatatcttttattctcgaatgcgtaagggaagaattgtcccatataacattttcctttctaaattcattctagttaaagattttaacatattttaatgatatagtgtttaaagtaaaataagaaattttgatgtagaaaggagcttaatgttatgaatatgcctaaatcagtgtggtggctagtaattggtatggcattaaatatcacaggctcaagtttcttatggccattaaatacaatttatatgaatgaagaattagataaaagtctaactatcgccggattagtactaatgatcaattcatttggcatggtcataggtaacttattagggggcatgctttttgataaattaggtggttatcgtactattattataggaacagtaatttgtttgatgagtacaacactgcttaattttttccatggttggccatggtatgctgtatggctagtagcactaggatttggtggcggtatgattgttccagcaatttatgcattggctggcgccgtgtggccacaaggtggtcgtcaaacttttaatgcaatttatttggctcaaaatttaggtgtagccattggtgctgcatcaggtggatttgtagcagaattaagttttaattatatttttatagcgaacttattaatgtatgtcgcatttgcaattgtagccgtgacacaattcaaaattaatttagatgttaaagtgaaatcaacggatgcaatgagtcttttatctaaagcatatagaccacagtttatagcgctaacgctattatgcgttatgttcagtatttgttggattgcttatattcaatgggaaagtacgatagcttcgtttactcaagaaatcaatatttcaatgagtcagtacagtctgttatggacagttaacggcattatgattttagttgcgcaacctttaatcttacctgtcattagattgttaaaaggaaacctaaaatatcaaatgcttgttggtattgtcatctttattctctctttctttgtgacaagttttgctgaacaattttcaattttcatggtaggtatgattatacttactttaggagaaatgtttgtttggccagccgtaccaacaatagcgaatcaattagcgcctaaagggaaagaaggttcattccaaggttatgttaattctgctgcaactgtgggaaaagcttttggaccattaattggcggtgttgttgtagattcgtttaatatgcaagctatgtttttaagtatgattgtattattacttattgcactggtattcctgttaatatacgataaaaaattaccaaaagatacgtaagatatatgatgagtctgggatataaataaatatcttaggctcgttttcaattggcagtcaatgtatcgtcagcgctttgtacagaagtgtgccttttgtataagcatgaacattaattatccttgcgggcgtgggtctatgaaatcactgtgaaaaacgttggtctctgtctcactactttatataataatttattttttagttatacatgcttatcatatgtagtaaataagtatgtttcctgttaaatcaggttttactcttgaaataaatagttatttcaaatattattagtaatgtataggagtagtaactttaaaacttatctacagagaactagggttggtggaacctagtgttaagttaaa

SEQ ID NO: 7 - DNA, 4949 bp, Staphylococcus saprophyticus
cgcgattcctagtgattcgataagttattatttagctgataatctaccatattataaaatataaactctattttctccactttttttattaaagtttgttctgtttttttattttttcttcagccatccacaaccgctacaaagcttatttcatgctaaaaataaattcaaattcaatttttattttttaaattcccaaaaaataatcagaaaaatgtttatttaatgatataagtggaaaagtacctatgtcacaaatcataaaggaggcttttataatgagtaaatttgatgattttaaagaccaagcaaaagacaaagtagacgaagtgaaaaacgacaaagataaacaaaaagaagttaaagatcaagctcaaaataaagccaaagacttaaaagataaattttaagctttctaaattatcttgaatctaaatactgttaaataaaagcatctgtcagtacattaattgtactgacagatgcttttttgtatatttaagaattattttaaatttaatttctctgcaatttcttgctttttactatcaaaatctaatgcttgttgatctatagatgatccagtttcagcaacctgcttaatgttttccatttggaactgccagcctgcaaaatcaagtataatatgtggaaatgcaaacggtaaacattcatcgaaaatcaataccgtttctttaccagtatcatgtaaatcaaaccttacggtaccaatatcccatgtatagccaattgtttcattttcttcaaaggctgtaatttccatttcttcgtcgtcttgcccatccatttggaatttcatcttaccaccaacttgacggtcttcaaatgataattgtggaaaccattgttgaataccttccgttgtgcttaaaagtttaaacactgttgctacatcttgttcaatgattatttttaatgtttgatatgcaccttgttcatctttagaatatacagcttccatatgaatatgcccctttcgatttacaatcgcctcattttgaaacacatatgaattgataatactgctattcccatcttattttattttaatcctaggtctgatcggttattcacttctaatttacgcgcttttcttgtatatcttaaataaatcaagccaagtaagataaaccacagtggtgataatacaacacccattcttgtttctggtacaacaagtaagataatcaatacgaatacaaagaatagctgtaccattcttgccatatgaataccaccgggcaatttaaagtcactctttttatgtaattcaggatgtgttttaacgtattttgcataggcatgaacaataaacatccatacagcgactaataaaattgttgaaattgctgtgacataaaagaacacttgtgttgcgttcggtattaaataatttaataacaccgtaatagataacaaagcgcatgttaccaatattgctatataaggcacaccttttttatttgttttcattaataaatgatgtgtttgttttttctcagataacccaaataagattctactatttgcaaatataccactattacatgccgatgatgctgcagttaataccacaaagtttattaaccccgctgcaaatggcacaccaataagtgcaaataaacttacaaatggactattatttggatcaatatcttgccatggaataatggacatcatcaccgctaatgcaccaacgtaaaataataatattctgattggtacactgttaattgctttcggtatcgttttttcaggattttttgtttctccagctgttatacctaatatttcaatacctgtaaatgaaaagacaaccatttggaatgacatgaaaaagccagatgcaccatgagggaaccaaccaccattattataaacattagagacccccgtcttaccaaaaggtgtttgaattgcaaatacaatcatgacaataccaataactatcaatgcaatgattgttacaacttttataattgcaaaccaaaattctaattcaccaaacatttttgtacttgttaaattaaaagccataagaatcaatatacaagacaaagatgtgatccaatttggtaaatcgggtatccaaaattctacatattttgcaactgcagtaatttctgccatccctgaagtaatccaagttaaccaatacgtccacccggttacaaatcctgcaaacggaccaatctgatcgtgcgcaatatctgcaaatgttttatattctgtattagaaagtaacatctcacccattgcacgcataaacataaacaatacaaaaccgacaataatatacgtgagtaaaatcgatggccccgttaaactaatggactgaccagcccctaaaaataagccagttccaatagctccaccaatcgcaataagttgaatatgtctattactcaactctctgttcaaagtatttgtcataaatcttgccccaattccaattgttttaaagcatcattaatatatcgccttagcttattagcccctttgttatcaattaataaactaatgtaatgattacatgcatatatctcaataatgcttggttgtataatattctttttttctgaaaattacaactaatgctataaatcatttttgataattttgtatttttacatttttgattttttaactctttaattgattaaaacaataaactataatctcatttttaatatttgaatttcttttttaaccattaaatatcatgtgccttgatgaaataaaaaatagcacacttttattacttaacgacatcgttaaaataaaaagtgtgctctgatttcacatacgatgaacgtacctttgaacaaatattttataagcacttattgcgtttctatagcctctttaatagatttaatgttctctggtgttgtttgacaacaccctccaacaatcttgacgccttggtctaaccaatcaggtatttgttcaacaattaaaccttgattacctacactttcccattctttctccactgcattgtactgtgcaccgccattaggataaagcgctattgtttgaggtacatttttcagtcctttgcttatagctttatttatacccgcgacggatgaacaattaataccaaacaccggtatgcgttcagcatattgcttaatataagcacataacttttcaaattctgtgtcatcagataaatcaccgtcttcattaactgtgacagataaccaaaatgtctgatttgtataatgtggcacaatatattcaacaatcgctttaatttcctcgaaattaggcacggtctcaaatacaaaatcattgatgcctcttttaaccaatgcttctatacgcgttttatggaattgaaaataatcttccttacttaaatcgtatgcacctgtgtactcagaaccatcacttaaataggcaccgtatggccctaagctacccacgataacttgtgtatccgtcgtggcttccataatttgatttactgcagtattatatagctgatctatttcagttgccttcatcccaatatcagaaaaagtttggtaactcgcttgatacgtacttgtaagcaatatgtctgcccccacatccgtaaatgcttgatgtgcttgtttaatttgtgtagggttattttttaaaacttcactggaccataatgaagttttcaaactacagcctgcttgttctaatgttgttgccaaaccgccatctagtaccaatggcgattgagctttcaatttttctaataaccgcatttaattacctcttttcttatgatacttaatgaaataatatatgagtgctatgacagcgaatggtacaccgaaataaagtgcaggtgcctgattagaatcaaaaaccattcctatacatgaaactaaacataaaataaatcctataataggtatagattgatgaattttaaggctaggatcataccttttagcattgaaataagcaacacatatactcatccacacgatgactacagcgagtcctgcaatggacaccagcacaacatagagtgaatccgctgcatagatgcttgataataaagccaacagaccacctaccatactaaataatgttgcgttgataggcatgcgatatttattcaactgtccgaaccattttggaaataccccttcattggctaaactccatatcattctacttgctgcatataatccagaattagcggcagataataaggctgtgataatgactagattcatgatatctccagcgtaaggtatccccattttttgaaagatgactacaaatggactttccaaagatttcccttgataacttggaattaaaatagaaataataaccattgtaccgataaaaaagataattaagcgccataaagttgcacgtatcgctttaggaatgacttgtttaggattttcagtttctcccgcagcaataccgatcaattccgtgccactaaatgcgtaattcactgctaacatcgttaagaacaccgcacctataccattaggaaaagtaggattcgtatatctgttagtcactgtatgtataccttcataaccattgtaatgtatcaaacctaaaatgacacatatgcctaagataataaatacaataatagtaaccactttaactaaagaaaaataaaattcaacttctgcataaaagcgtgtcgatatgatattaaaaattaatactaatataattgcacttgcagcaaagatatattcaggtatttctggaaaccacctttgcatcaaaatacccactgctgtaaattcagaacctaatgctactgtccaggtcaaccaataaaaccacgcaacaatgtagccaatagatggatgtatatatttactcgcatatgtatgaaaaccacctgtcacagggtgtttaatagccaattgtcctaaacaaagcatgacgagataaacaag

SEQ ID NO: 8 - DNA, 770 bp, Staphylococcus saprophyticus
atcaatttgttgttgataatcctcccatgtaaggtcaacaaatgcttgttgtagaacagggtcaaatttaaagccaacaagtgcattattgactatagcatctatgtgaccaaaatattgcgtagctttctcaactaacgcgtctatttcattgcgttttgtaacatctgcttggatagcgattgattgatgagttccaatttcatctacaagttgttgtgcagcttgtctgctgttgtgatagtttatgacaacgttatgtccttgttgtgctaatgtgttcacgattgtcgcacctaatcctcgactgctaccagttacaattacagtttttttcattttatacactccttattttctataaaaaaatacacaacgctcctgaaagaaggttgtgtataatgaatatcgacatatgtatcaaagtacttcaaaatattgaaatatgctagacttcacactttcctccgctagtttaaactagatcaggttcaaagggtttgagtcagactcatctcagttagaaacacccctagtgcatttgttatgtaatttaagttaaatgtatattttttagtgaattatgtcaagttaagggtgattaaggagatgtggcttcccaagaattaaagtagaaaaagaattttgcgtaataatgaaattggtaaagaagaaactctttacaaattattgaattactgttattattatttcttgtagaaaataaaaactatgaaaacaaaaggagcgaatataaatggcagttaaat

SEQ ID NO: 9 - DNA, 5517 bp, Staphylococcus saprophyticus
tgtcatccccaaagcaagataggaagacgatttaaactgattagttttttcattagaatgatatttgggcacaggacattcacacattcattgttattcatcgcaattattgtttgtttactatatgtcatacaaacgccatcatactatttagttacgattattctaggattgctttcacatgttatactagatatgctaacgccaagaggtgttaagttattttatccgataccaattaatgtgaaattcctagttgtatttaaaactggtgggctagttgatatctcaatggcaagtgcattgaccattggcgcaatttatgtgatttttcagccattttttaataatctattcttgaattggttataattatggttgtcctaagaatcataataatataaagtacatatagtgaaatgatatatccatattataaaaaaggtataaattatatctgattaaagggatattaaggagagagagcatgttagataagaaaacactagaaaagtttaatcaagaacatctcattgagtttgaaaaattaatgagttcaaatgagaaagaacacttatctgaaaaacttgaatcattaaatttagctgatattagaaatttatataatgatttatacttgaataaaaaggtaattgatgatgtttcttctgttaatgaagtcaaatatgacgtgaaaagcgaatttacagttgatgaaatcgaacaatatgaaaaaattggacttgatgcgattaaaaaaggcaaatttgcagttttattaatggctggtggtcaagggacaaggttaggctacaaaggtccaaaaggttcatttgaaattgaagatacgagtttgtttgaaattcaagcgaaacaattattggcattaaaagaacaaacaggtcagtatatcgactggtatattatgacaagtaaaattaatgataaagaaacacaactatatttcgagtcgaaaaattattttggttacgacagagatcatgtacacttctttatgcaagataatattgtcgctttgtcagaggagggtaaactggtattggatgtggatagtaatattcttgaaacgccaaacggtaatggtggtgtatttaaatcattagcaaaatcaggttatttagatgaaatgactgaaaatggcgtcgaatatattttcttaaataatattgataatgtgttagttaaagtattagatccattatttgcaggatacacatttcagaaaagtatggacatcactactaagtccatacaacccaaggatggggaaagtgttggtaggttagtcaatgcgaatcaaaaagacacggttctagaatattcagaattagatccagaaatagctaatgagtttaacaatgctaatattggaatccactcatttaaactggcgtttatcaataatgttgttgataacgacttaccatatcatttagcgattaaaaacttaaaacaattagatgaagactttggtgtaattgaactaccgacattaaagtttgaactattttattttgatatcttccaatatgcgcatagttttgtaacattacaggtacctagagaggaagaattctctccacttaagaataaagaaggtaaagatagtgttgaaacggctacggctgatttaaaacgcatgaatatgatataaaaaggtggttacactcatgtctcattcagtagaagctgaagataataaactggttaaaacatttaaagatattattcccctgacttttggggaagaaattggcaactcagtatcacatggagtggctgcttttatagcattatgtgcattgccttatgcagcgatacatagttttcttgaatatggtgtgttaggtgcctttagtgtctctgtttatgtaataagtatttttttaatgtttatctcatcaacggtatatcatgccatgccaaatcaatcatcacataaattcatattaagaataatcgatcatagtatgatttatgtcgcgattgcaggtacttatacaccgatatgtcttactttggtcggtggttggattggctggtctagcatggttgtcttgtggggcattacaatctggggcattctttacaaatcgttagcaaaaaatgttaatcataagttaagtttgattatgtatttagttatgggatggattggtgtactatttttgccaacaattatttttgattcatctttactatttatgttatttatattgtttggtggacttgcctatacaataggagcttggttttatgctcaaaaaaaccgtccgtattttcatatgatatggcatttcttcattatagttgcatccgtatttcactttgtagctatcatgtattttatgtaagataattaaagttgttaacagtgttcattgacattgttagcagctttttttatggcatgtttaaatgttgtatgcactgaagagcgtttttgaaaaatgtgttgaacttataaataaataatggttaagtagatattgatattgttacaaaatttaagggttaggaagttatatatgaatataaaatcattaggcattattattgcgttaatattaattatgtttatgtctgcaatagaaacttcaatcgtttccttagcattgccaactataaaaaatgatttaaacgtaacgtcatctatttcattgatatttgctgtgtattttattgcaattgttattgcaaacccgattgttggagaattgttagatcgtactaaaattatatatattacattattagggcttatgttatttacaataggaagtttattttcagggctaagtgacacatttaccatgttaatcatctctcgctttattcaaggattgggtgcaggtgtcatgatggcattaagccaaattgtcccaaaactggcatttgagatacctttacgctataaaatcatgggaatcgttggaagtgtatgggggatatccagtattataggacctgttttaggtggcggtattttagagtttgctacatggcattggctattcttcgtgaatattccaatttcaattattgcaatcatacttgtagtgattacatttcatttcgagaatgaaagtacatcaactagtgctaaattagatgtaaaaggcttatcgttattttatacttttgtattctttttaatatttgcagtgatgtatacagccaatatttatttaaatatcatttcaatcatattagctacggttgtcggtgttgtgttatatagaaatgaaaagacaataaaaacaccttttataccagtgcaagaatttaataaaacaattgttttaatattttttactgattttgcatatgcaattatacttatgggttataacctctatatgccaatttatttacaagaagatcttggcttatctccattacaaagtgggtttgttatttttccaatttcgtttgcgtggctagtattgaattttaatttagataaaatagaagcaaaaatgactaggaaggcattatatatatttgcatttacatgtttaatgctttgtggcattttagtatttataggaactaactctccaatttttattgcttgtagtttgttattagcaggtataagctttggtacagtttatactaaagatagtgttatcacacaagaagaaacctctcctaaaaatatgaagcgtatgatgtcattatacactttgactaagagcctgggtaattcagtcggatcgacaattatgggctatgtctatgcgttatctattccaattattggtttgcatattcataacattgtaattttgagctttgtcatcttgtttatacttataatattatggtccatcacatatcgaaaacaagatacattaacttaacatgttttaacattgctaagtgtttttgtttaaaatgaataacaaatgataatatagtaggttgaatttctgtcgtttggtcatataaagttataatggtaagatatataatgcattcatatcacatataagaaaatatatgtttatatagtcaatgattgattaagaaagggaggacagtaagctatgaaatatttaagatatttattaacaacgcttattgtgctttctgtatttattatttctggtgcgatttttttaacttttttaggatttggtttatacggattaagtagaattttaatctactttcatcttgcatattttggttataataaaagtttttacgataacttgatatattacggtagttatattgtattaggctatttcaatttattcattgtagaaaatttaatggattattttagaaaaaaattacctgaaaatctttactttcaaggacttacctttcaattaattacgttttcagtaactacattgttgttttattttatagtgcacatacattatacctatatcgacatcgacttttgggtaattgtattaattattggcgtattattcatctgtaaagaaatattttatcctgatagtaaaaatttaaatcaaaaaaataaataatgtaagtgaacattatattcttaaacataaggaagatcttgcatattttgaattccaaacaacttaaatacattgatctaaagtgaaagtagttagcttattattctaatattaagaatagattgagctaactgcttttttattgaacaaattatatttatacttaaattaagctatttgaagcaaatgttagttttgtttgttaaaatataattgatatttaaataggagggggacgctttgtgttaacgatagcgcaagttaaagaacttgttggagaattaaaagatccaataatagatgtaccattaaaagaaacagatggaatagtagaagttactattaaagaagagatagaacacgttagtgttaaagtagcaatggcgcaattaggtggacaaccgcaattagatttgcaaatggctattgtagaagtattaaaggaaaatggagcaaacacggttggcatcagatttgaagaattgccgagtgatgttgttgagcaatatcgtggctctggcgaaaacgaaaatcaaaccattgaaggattactgtcaaaagataatccagtagaatttatcgctattgcttctggtaaagggggcgttggtaaatcaacagtcgctgttaatctagcagtatcattagcgcgtgaaggtaaaaaagtaggcttagtagatgctgatatctacggttttagtgttccagatatgatgggaattgatgagaaaccaggtgtacaaggcaaagaaatcattcccgtagaacgtcatggtgtgaaagtgatctcaatggcattctttgtagaagagaatgcaccagtgatttggagaggacccatgctaggtaaaatgttaactaatttctttgtagaagttagatggggagatttagactaccttatcttagatctacctccaggcacaggagatattgcattagatgttcatacgatgctaccttcaagtaaggaaattatagtgac

SEQ ID NO: 10 - DNA, 6570 bp, Staphylococcus saprophyticus
ctatcttcattatgatttaggaaagcgttttcttatagtgaactggaggataaattatgacttacagtatagggatagattttggaactggctcaggaagagtgttcttggtgaacactgagaatggagaaatcataggtcaatatgtacaaacatatgcccatggcacaattgaaggtgaactcaatggacacaagctgccacaaagttatgcattacaaaatgcgaatgattatatggaagtcattgaaacagggataccagaaattttggcaaaaacaaatatagatgcaaaggatattgttggtataggtatagacttcacttcttccacagtcatatttgtagatgaccagatggaaccaatgcataacaatcctaaattttataacaatcctcatgcttatgtgaaattatggaagcatcatggcgctcaggcagaagcagatctattgtttaatactgcgatagaagagaagaatcgctggttaggatactatggatttaatgtgagtagcgaatggatgattcctaagattatggaagtgaatgataaagcgccagaagtcatgactgaaacggctgatattatggaagctggggattggattgtgaatcgacttactggtgaaaatgttcgatctaactgtggtttgggctttaagtctttttgggaatcatctacaggctttcattatgatttatttgataaagtggatgacaatctatcagatattgtacgcacgaaagtagaagcgcctatcgtcagtataggtgaaagtgtcggtacagtgagtgcagagatggcacataaattaagactttcacctgaaacggtagtaagtccgttcattatagatgcgcactcaagtttactaggtattggtgctgaaaaagataaagaaatgacaatggttatgggaacaagcacgtgtcatttaatgctgaataaagagcaacataaagtacctggtatctcggggtcagttaaaggtgccattataccagatttatatgcatacgaagcaggacaaacagcagttggtgatttgtttgaatatgtagctaatcaatccccatatgaatatgtaaaaacggcagaagatagaggaatttcaatttttgaattacttaatgaaaaagcaagtcagcgttatcctggagaaagtggtctgatcgctttggactggcataatgggaatcggagtgtgttaagtgatagtaatttgaaagggagtctatttggattaagtttacaaacgaaacatgaagatatatatcgtgcatatatggaagcaacagcatttggaacaaaaatgattatgcaacaatatcaaggttggcaaatggaagtggaacgcgtttttgcttgtggtggtatacctaaaaagaatcatttattaatggaaatttacgcaaatgtattgaacaagaagattacagttattgatagtgagtatgcaccagctatcggagcagccattttaggtgcgatttgtggcggtgcgcatcctaatttttcttcagctatccaagcaatgaaagaacctgttttatatcaagtagaaccagatcatgcacaggtcttaatttataaaaaattattcaatgcctataaagaattacatgatttactgggatataaaaaagcacgtattatgcgtaatgtgagcgcattaatgtaagtttttataagagtgatatgactaaaatcaacgaccgcaatcatgaatggaaaatcattttggtttgtgcactgaaaaagaggtagttaaataataacgtattacacttgaaggagatgttgataatggaatgggaaattgtaaatttagacatgacgtttaaagtagatgcaccagtagaagaagtgtttcgtgcctggactaagccgagtctttttaaacagtggtttatgacaacagaaaacgaataaagttgccaagaatcaatttgaaatcaatggagactgggaaattatcgatgtcagagagggcgttgaatatagagcaattggcacgtatatagatattgtcagtccttataaattgacgttttcatttaaaatgcctcaatttagtgagttagaagatatcatcactgttgaatttgttgatttaacaggagcaacagaagttaaatttaaccaaggcatcaaagttccttttgaaggcgacacaaacgatttcgaagcggataagacagaagtcaaaaaagaaatggaaacaggctataacttgatgtttgagcgattaaaacagctatgtgaaggttaatatttacagtgaagtcacttttagaaagtacttataagtagtgacaaagttgaaggtaataggttttgcctaatttgagatttaaaagcccaagttaagttttcaataactcaacttgggctttttgaatatttaagacataaaactcaaaatcgcatctatcaagctataaaggcctaagaatgtaacgacaagtaccacaatacccccgattatattgagccatagcgtatttacgtaatgacccatcaagtttttcttattaattatgatgaaaataagaatggccacaataggtaagataataccatttaatgcttgggccacaagtagcacttgaagcggttcaaagcctaaagctgaagtaataataccgataatgatgatgatcgtaaaaacagtcttatatttcttactttgcatcccgccttgccaacctaataaactactgatcgttgcagcggcgcctgcaggtgatgcaatagctgaagagagtccagctgcaaataatccgatactgatggcgaatggtgctgcatttccaagtacaggttcaagcggaccagcgagttgaatcacacttgtcacttctttaccttgtattaaagtagcagcagcaattaatatagctgctgaaataataccaccaatagaaattgaaatgacggtgtcccaacgtgcatattttaattctttaatattgccaaaacgttcatgtactgcagttgaatgtataaagaaattgtatggaaccacggtagttcctatcagtgcgatgattgtgataatagatccgtttggaattgtaggcacaaacacaccttttaaaataccaacaatatctggttgaattactatcatcgtagtaataaagataatgcccataataaccataagtacaagcataattttttctaaaaaacgatagttgccaaataacccaatgagtaaaatgatgataccgatgacaggtgctacccaatgctctggtaaatttaataaataagaagcacctaacgaagtcccgattaagtcaccactgatataggcagcacaaccaattgtaactgctattaatgtaaaccatacaatgataagtttaccgactctatgtttaaataaatcttgtattgcttcacctaaaccttcacgtgtgacgagagataagcgaatgatcatttcctgcagcacaattgtggctacaatagaaaatacaacggcccacaataaactataaccgaaaccggcaccaccttgtgtcattgtggtcactgtacctggaccgataaatgaggcagtgataatcattccgggaccgagtgatcttaaaatcttcccagcttctttaaacaatagcaccactcctcaaattattttgtttgatttaaataagcgacgtggccagcaagtacatataacactgctgtagagacaaaatgagctgagttttgattggcatccatcataggatatacttccacgtagtccatgccacaaaggcctagttttccgaattcatgaatcatcgtaaggagttcataagaagataacccattaccatcgacaggaccaccaggattaaaggcgaagtcaagtacatcactacagatagttaggtagacaacatctacatccttgctcgcttgcgcgtagatttcgtgagcatatgttttcaagtctttagccgctcgaatatcattaatagttaaagttactgtaccagcttcttgtgcgaagcgaccagtttcaggcttatttctaggaccgtgtataccagtgtgaataatactttcgttgcgtataccatccgtttcataaagtctcataaaaggggtgttacgcgcataaggttcaccttcgtaatcaggcatgttgtcatagtgcgcatctaaatgaatgatgcctacttttttgcctgtttccgttagtgctttcagtattggatatgtcacaccatgctctccaccaaagccaactaagaatttaccactatcccaaagctttttagcgaaatcactaatattgtcgtaactttgcttattatcgtgtgctacaaagggcacatcaccaacgtctcccatcgttaggtgttcactgatatcaatgtgattgagctcaggtaaatattgactatagcgagctgaacaaacacgaatttgtttcgggcccaattctacacccgtataatcgccccaagtactttcaccttcaaatggtgcgccataaacgatgacgtctgtatctaatgtatttgtctgattgagattcttactatttaaaaaacacggtacattaccataaatattgttcttcataattgtacatcctcccttttgttgtaaataagtatatagattattaatttgtatttcaaataaatcagaaaattctaatttttgaaaagtgaagatatacttaaatattaagaggatagcaatgaaggtgtgatggagcagcttaaaataaaaaagtgaacctcagatataacaatgaagcgcaataaatacagcgaatatggaaaacacttagatgctataacaaaaaagctatgaagtcatctcgcgtcatagatgacttcatagctaagttaagtatattatgaaaatttgattgataacaatacatcatttgattattcgtcggatatagtccctaaatatataggaattatgcccaaccacggaaacgagatgcttcggcagttcgtttaatacctaagacataggcagctaaacgcatatccatttttctatcttctgctaaatcatatatcgtattaaacgcttcaaccattttatcgcgtaattttgtgtttacttcttcttctgaccaataataaccttgattattttgtacccattcgaaataagatactgttacaccaccagcactcgcaagcacatctggaataattaagacgccgcgctcagttaaaatacgtgttgcttctggtgtcgttgggccatttgcggcttctgctataatttttgctttaatatgatgtgcattcacttcgttaatttgatttgaaagtgcggcaggaactaaaatatcgcaatcgacttcaaataattgttcattaggaataacgttgtcatacaaatgtgtaacgcggccgtgttgttcctttaattcaacgagtcggtctacatctaacccattagaatcatgtaatgcaccaaaactttcagaaatagctacaattttagcgcccatatcgtgtaaaatttttgcgataaagctacccgcattaccgaaaccttgaattgctacacgagagcctttaatgtcaatgtttttacgcttggtcgcttcttcaattgtgattactgcacctaatgcagttgcacgatttcgtccttgtgaaccgcctaatgaaagtggtttacctgtaataaatgcaaacgcatttgagcgattaatcttactatattcatccatcatccaagacataatttgggggtttgtataaacgtctggtgctggaatgtcactttcgggaccaacaaattgagaaattgcacgaacatagccacgagataaacgctctagttcttggttactcatttgtcgtggatcgcaaataataccccctttaccgccaccaaatggaaggttagtgataccacatttcatagtcatccacatagatagtgctttgacttcttctttattaacatcaggatggaaacgaataccacctttagtaggacctacagcatgattgtgttgggcacggtagcccgtaaacgtttttacagtaccgtcatccatgcgaatagggatgcggacttctaaaaatcttaaaggttcttttataagttcgtacataccttcatcaaaacctaatttatgtaaagcttctttggtaatttcttgagtagaagttactaagtcattatattctgtcattataaaactcctctatttattacttagatatttaaagtgatacatagtttatgttaatagcgttgagaatgaaaagcaatacaaagatctgaatttttataaaagtttgaaaattcagttaatgtaataacgctttcttttaagctggatgaataaactcaattaataatttagcagtgggatatcaaagatactataacttactattgactaaattttcagaaatcaataaaatgtttaattatatcaaaaatctatattgagtacttaaagataaggagcacattcaatggaacaaacatcatttaaacgtgccatgaaacagcgccatctcatgttattaagctttggtggcgttattggtacaggattatttttaagt

SEQ ID NO: 11 - DNA, 10082 bp, Staphylococcus saprophyticus
cggactcgcttaaagattcgctggtacttaatgattcggactcactcaaggcctcactctggcttagtgattcgctggcacttaatgattcgctctcactcaaggcctcactctggcttagtgattcgctagcactcaatgattcgctttcacttattgactcgctttcgctcaatgattcagactcacttattgactcactcgcgcttaatgattcggactcacttaatgactcactttcactcaatgattcgctttcacttaacgactcactcgtgcttaatgattcgcttgtgcttaatgactcacttgcacttattgactcactcgcgcttaatgactcggactcgcttaatgattcgctatcactcaatgactcgctatcactcaatgactcgctttcactcaatgactcgctttcactcaatgactcgctatcacttaatgactcactggcacttattgattcactcgtgcttaatgactcactttcactcaatgatccgctatcactcaaggactcactcgtactcaatgattcgctctcgcttaatgattcagattcacttaacgactcactcgcactcagtgattcgctttcactcaacgattcgctctcactcagtaattcactttcgctcaatgattcactctcactcaacgattcactggcactcaatgactcgctatcacttaatgactcactttcgcttaatgactcgctctcactcaaggattcgctttcgctcaacgattcgctctcgcttagtgattcgctcgtactcaatgattcactcgtacttaatgactcactttcacttaatgactcactggcactcaatgactcactggcacttaatgactcgctcgcgcttattgattcggactcacttaatgactcactggcactcaatgattcgctttcgcttaaagattcgctctcacttattgactcactagcacttaacgactcagattcgctcaatgactcactcgtacttaatgattcactctcactcaaggcctcactctggcttagtgattcgcttgtgctcaatgattcggactcgcttaaagattcgctctcacttattgattcactggcacttaacgactcagattcgcttaatgactcactcgcgcttaatgattcgctctcactcaatgactcactggagctcaatgactcgctggaacttaatgattcactttcactcaatgactcactggagctcaatgactcactggagctcaatgactcactggtacttaacgattcgtattcgctcaatgactcacttgcgcttaatgattcgctttcacttattgattcactggcacttaacgactcagattcgcttaatgactcactcgcgcttaatgattcgctggtactcaatgattcgctctcacttattgactcactagcacttaacgactcagattcgctcaatgactcactcgtacttaatgattcactctcacttaacgattcgctttcacttaacgactcactttcacttaatgactcgctggcactcaatgactcacttgtgctcaatgattcgcttgcgctcaacgattcactttcactcaatgattcagactcacttaatgactcgctctcacttaatgactcactctcgcttaacgattcactctcactcaatgactcactagcactcaacgattcgctggcactcaatgattcactcgtacttaatgactcgctctcacttaatgactcactggcacttattgattcactttcacttattgattcacttgtactaagtgactcggattcgctcaatgactcactcgtacttaatgattcactctcacttaacgattcgctttcacttaacgactcgctcttacttaatgactcactttcactcaatgactcactttcactcaatgactcgctctcactcaatgactcgctctcacttaatgactcgctctcacttaatgactcactcgcgcttaatgactcactggcacttattgattcactttcacttattgattcactggcacttattgattcactttcacttattgattcacttgcgctcaacgattcagatccacttaacgactcgctttcactcaatgattcgctctcacttaacgattcggactcgctcaatgactcactctcacttaacgattcacttgcgctcaacgattcagactcactcaacgattcactctcactcaatgactcacttgtgctcaatgattcacttgcacttaaagattcactggcactcaatgactcgctttcactcaatgattcgctagcacttaatgactcactcgtgcttaacgactcactcgtgcttaatgattcgctctcacttaatgattcgctctcgctcaatgactcactcgtacttaatgattcactctcacttaatgactcactcgtacttaacgattcactctcgcttaatgactcactggcactcaatgattcgctttcgcttaacgactcgctttcactcaatgactcactggcactcaatgattcgcttgtgctcaatgattcggactcgcttaaagattcgctctcacttattgattcactggcacttaacgactcagattcgcttaatgactcactctcgcttaatgattcgctttcacttaacgactcactcgtgcttaatgattcgcttgtgcttaatgcctcactttcacttaacgattcactcgcacttattgactcacttgcacttaacgactcactttcacttaatgactcactcgcgcttaatgactcactcgcgcttaatgactcacttgcgcttaatgactcgctctcactcagtgattcactttcgctcaataattcactctcacttagtgactcactctcacttaacgactcgctttcacttaaagattcactggcactcaatgactcgctttcactcaatgattcgctggcacttagtgattcgctcgtactcaatgattcactcgtacttaatgactcactggcactcaatgactcgctttcactcaatgattcgctggcacttaaagactcactcgtgcttaacgactcactcgtactcagtgattcgctttcactcaatgactcactcgtacttaacgattcagattcgcttaatgactcactctcacttaatgactctgactcgcttaatgattcgctttcacttaatgattcactggcacttattgattcactttcacttaacgactcactttcactcaatgactcgctttcacttaacgattcgctatcgcttaatgattcactctcacttaacgactcagattcgcttaatgactcactcgcgcttaatgattcgctctcactcaatgactcactggagctcaatgactcacttgcgcttaatgattcgctttcactcaatgactcgctctcacttaatgactcactctcacttaatgactcactttcactcaatgactcgcttgtacttaaggattcactctcacttaacgattcactcgtactcaatgactcactttcacttaatgattcgcttgcgctcaacgattcactttcactcaatgattcagactcacttaatgactcactggcactcaatgattcactctcactcaatgactcactagcactcaatgatagtgattggcttaatgattcacttgtgcttaaggatagtgactgacttgttgattcgctttcacttagcgatagtgaatggctcaaactcaatgattgtgaagtgcttagcgactcagataagcttagtgattccgaagttgtgtcagaaactaaaccagcatctatcgtcatattgtcagcatctttaatagtaacgtgtgcaatgtatcttccattctcgaaaactacatctgaatctttgtcatctacagtgttgttcgcttgtgtaggaatatatccttctggcattacgaattccacaagataattaccatttgttaaattatcaaaattgtagtgtcctgttatatcagtagtcgttgtggctaaacgtataccagttgggtcaagtaaattcacagtaatgccagctgcagttgcgttcgaatcattctgaacaccgtcattattcttatcaaaccatacataaccaccgaatccaccgaatccagcaagttctgctctgacaaactgaatgctacttgcgtgtgctcgtgtgtctctttggtttttattattagtaaatgtgtattctgattttaatacaccaatccccgaaaaatcaggtagcgtgtttggtttacttcttattatataaccaagtgttccaatatcccccaggtctacagttgctgatccatcactatttataatgattttaggatttctaacttgcgttaagtttgcataatctggtgagaaactatctctgaattgtgagttatttaatactttataaacctcaatctcatcaggagatgtaaatttgaatccttggccacttaacctaacttttgatcctgtattaaatgctctattttgatttatataagttgtaaattcagcaaagtccttcgtcaaataatttatatctgaaataactggtaccgttctattaccataattgaatatgacattttgagtataatcctctccagcaacagtaatgcctactgggacactctgtttatcagtagtaactaattctttaaatggccaacttaataaactaaaagatcctctcacattattataaatatccacataatttgtgaaggtatatttcgcagtattcgttgcactatcatacgatccaatagcgattgttctcccattagcatcatgtatgttatttactcgatacggttttcttgatgtacctggatgtatatatttaccgaaatcaactgtaaaataatctccttcaaccacggagtcatctaccgtatagtcaatcttaattttcaacttaccatccatagtcataaatacttgattgtatttcttaccgccacctagtatttcatatgaagtgtttgcaaagactaaatggttaacatttctaccactctgattagctgcataattaactacattcgttgctcttgtatttgcagatctaaatttacttgtagatggtttagctaaagttttttcaatattcgtagtattcgtttcaatacttaaactttcgttatttgtttccgcacgctttgaagcaggcacattggcttgtactttatctttatccatttgattagctagttcaattaataataatgcgattaattgatctgaattttgtttagtaaaatcaatgtttaatttttcaatagctttttttgcatcactagctgtagcattcgtatgtgtttggtaataattttctaatagagattgcttttctgtgttatttttagcattatctaattgctttaaagagtgatttactgattttattaaatttgagcgggttgcattatcttcaggtttttcaatagaggtactacttggagtgttaactttatcatctttattaacattttcatttttagactctaaatttgtttctttgttatttttatagacgttatcttctactttattttcgatacggtgattatggctttctaattcatttttctttttgccgttatctttttcatctttatatgtatctttctctttttctaaatctaagctgccttcatcatttttttcagttgtattttctttgtttgcttcttctacagctttactttcttcggttgtgctttcttcggttgtgctttcttcagtttttctgtcttctattggctcttcttctgttgatacttctttactttcttcttttacatgattttcagtagcattttgattcaaatgagtttcatgatgatttgacgtatcttgctcatttataggcttttggtcatactcactagatttatcgtggattggtatctcactatgattagaatagttagcctcgtcattatcattaattatgtttgttctttcttcatcatgttgtactgaattggacttgtttgattcgcttttgtaattattatcagtctgtccatatacttctgatgttggttgctgttccgctgcatccgcttctttatcaattactgcacctaacaatatcgttgatccaattaatactgaagcgataccatttgtaaatttacgtatagaatatttatttaatcgattaggtaagaaatcaaatcgatgtcttttcttgtttttgttcatatgttcctcctaatttactaacctaaatttctagttgatttttattgtactttatgtccttttagcacaatacatttcttattttacctagtagtacaaaataattccacaatattttataattacacaagaatattatgctttagtttattaaaatcaatggaaaaccaataacccacaatcgctttctcactgaatttaattgtatctgtatcatttctgtgaattttatttcttaccgtcaataaatttaattttgtcccgttttcaaaaatttttgctatagaaaaagcttctttttaagttatcaccctaaagtgtgtacttaaaaagaagctttaattgaatataatttaataaatttacctttttatcgtttggtctaaacttttctataacgcttaagacctacaatattaagcactgtaaatacgaaaataaatacgaacagaataccaatatcgaaccaaataaattcgaatccttggcttttgatcataatattggtcaatgcatccccagcatagcgtaatggaaacaaatagcctatcacactgacccaatcatcaatattttcaagaggaataatacctgaaaagaaaacttgtggtattgctacaattggaataaattggatcatttggaattctgaatttgcaaatgttgatacgaagattcccatcgctaacgcagctaatgcaattaaaatattgattaatagtacccaccaaatactacctgccacttcaatgtttaatatgagaattgcataaaatacaatcagtagtgtttggagaattgcaaacaatccatagccagctaaataaccaaatacgatttcactacgtttaacggatgtagctaataagcgctctaatgttccatttgtacgttctcgtaataatccaatgcctgatattaaaaacacaaataaaaatacgaagaaaccaattaatatcggaaacattttatcaaaataagtgctatcttcatctccatataaataatgattatctaatttaacattttcatcttgttgtgcatttttttgtttcatattattcggtattttttcaacgattttcatcatatcttgcatcttattttgttgtatcgcgctaccaagtaattgttttattgaacctgttttactaggatcttcatttgcatatgtgacctctaaattagaaccatttttcgtaatgtaactatctaatttagtatttacgatcgtatcttttatagaatcgggcgattttattttttctatatctactttatctgaaggtaatgcattcacaattttttggggtacattgtcatcgatgcctatttttaaatcagtttctgaatttgtatcgaatacaaaatataataatgttaatactaggattggtgcaaataacatgagcgccaaagttcttttgtctcttaataattctttaatcactcttatgaacactgctttgaatctcatgattgcacctccgcttcagctttaataaatacttcttctatagaatctacgccaaatttatcttttagttcttgtggcgtacccataataaataatcgtccttctacaattaaacctatataatcacagcgttcagcttcccccataacatgtgtagtcacaatcactgattttccttttttagttaaatgttttaactgcttccatatatctcttcttagacttggatctatgcctactgtaggttcatctaaaataataaggtttggattcgcaagtaatgtaatagctaatgataatctacgtttcatcccaccagaaaaagtattaacaattttgtttaattctccttctaaattcacaagtttcatattagtcgctatagcttgctttaatttctctccttttaagcccattaaattaccaaaaaagactaaattttcatgtgcagtcagtgattcatataatgcatcactttggcccatataaccgatttcatttaaaattttacgatctggtatttcagtatcaaaaatttgagcataaccttcatctaatttctccatacccatgagacatttaattgtagttgttttgccagaaccacttggcccgataagtcctaatatttttccagatgataactctatatcgatatgatctaaaactttcttcttaccataatatttagttgcatttgtcaatttggctacaagttcagacatataaagcctccttattagacacagtgtcaattatcgttcataatgcgattatatatctctactttgcaaaagcaatggaaaaataaccgttaatgaacataataaaatatatgtctattaatatttggagtgagtttaattgaatgaagaaatgatgacagattcgcgtatattaaaaacaaaaagaaataccagaaaggcattaataacgctgttgaagcataaaaagtatgatgatatttcagttaaagatatatgtgaagtagctggcattagtcgaggcactttctatttacattacaaagacaagtttgatttagtggaacaatatcaatttgaaattacaaaagaaggcagcaaaagagttcaaagtttattacaaagtgaacgtcatttgttgtattatcatataattaacttttggaataatgaagccgagcttttattgttgctcatttcgaataatggatcacctgacgttcaaaatcaactaaaaaaaacattacaatataatgcggaaaagaatgttttcccatacacaaaaaaatcccattttagtgaaaaagaacgacactattttgtagttttcttgagtaatgctatatttggtattattcaagaatgggtcaataatggtcaacaagaaaccccagaagaactatctaccattatccataaaattatacctgattctttattaggttaataaaacatataataaaagcacaatgccattataagtagcattgtgcttttttgaatcgtctgttatttattcattttctgcattaatttgtacatctttcacataaccatcttcaacaatatattgaactatgttatctccaatatgatatctataatcaaatccttgagcactttcaaatggcttttcaataggttgaccatattgctcaattaaagcttccttcgatactgcacccttcttcacttcaaaatctaccattgaagctgtttgctcccctgtctttgcaatgatttgatcatatatatcaatcatcgaactctcttgttgttcgtttccagtaatattataaccgttaatcacgaagttattattttttacggcttcaataaatgatggctccaatataaagtcatttgcgtcagtagtataaccatttacttgataatcaatattttctgatccatgtgcaataaaagttgagtttgatgtcatgctactcgttgtggcaaccattgcgctcagtgctaatccagttgctaatgttaccttaaccaattgattcatactcaatcgcctcctaaattttatatagcccaatcaattacaatattgcatattcttccagacatttccacacaacatttaagtctttacaaaaatttaaattttttatttatttttaacaattcctataaaaaaactattattacacttaggcataaaaaaatagtgagttaggcatttttacacaattaattaacaaaaagatatatattgtgtttaacgaattaaagcgcaagttttaatttaaatttctcaaaataaaggagtgtctcacatgacaggaatcgtagaagcaattggtaatgcagtaaacgcaggattagcacacgattgggcaacaatgggcgttagtatcgcaaatcaagctat

SEQ ID NO: 12 - DNA, 9750 bp, Staphylococcus saprophyticus
agtgatttggtttgctaatttcagattaatttgttcactttggttaagtgctttttcgtcatccaatacatttttattcggagtttgatcttgtgtattacttgctgcttgagcatgatgagttgtcaaagctgtacctgctaatgtaagtgctacaatcgaaggtaccttataagtgttctttttcttagccatttaactgcccctttaactatatatatttgtatcctattataatacgacgaaagacctagaggctggtttttactgttttgtaatataaaattaatctaaagccagtattaaaaaattataaagctaatagaaaagcgttataacgcctaatttacattatattaaaatattacactttctgaaatattacaaaatttaaatgaagaataactgtaatattcggatgaaaaatttttaaattatttttgtcatagcaatgtgttcgatattttcttccataaagatatcaccaatagatttataaccaagcgcttcataaaaggacttggcatgatattgtgcatttaacgccaatttactataaccttgttgttttgcagatgtttcaagaaattgcataagtaattgaccatatcctgatttacggtgcgtcgctctaacagctacacgttctatttttacactatcatttacaggacgaaatcttccagtagcaaaaggtatatgatttgaatcataaccaatgacatgagtggcaacgtcttcaaattgatcaatttcattttctaatggaacaccttgttctttcacaaatacttctttaccaatttctaatgcatcgtccatcattttaggtgtagtcacaatattaaacatatatttacctcttttctcattttagatattaaaaataccctaccataaaatagatggtagggtagagttatttgaatttattgtgcttcttttcttacgattgctgtatactgccaaaaaatacgcatttgtgcaatattccagttattcattcccatggtaaagccagaaggtttgaataggtttacatcggttacttctaacgctgcagcaatcaagtattggataggtacactgatttgcttcatagtatcagtgataccattttgatcatatacccaagtaaatggtaactcagattcaaaaacatcaactttttcaaatatttctgggagtgcaacgatgtaacacgcaccatcaactacaggattaaggtcactatctttatagtaaatgcgtaaggcctcataattctcacgatgttcatgattaacgtagaaaaattcatttctgaatagcgccatatctttgctgtgaatcaattgctgctctaaaacattaaacatgccattcacatgtgctagtttttcataagttttgcgtgacatattacgagctcctttctagattaatattgattcgttggtacttcttgagcgttctgttgttggtttggatcaatttgctgttggttaggatcattttgttgttgattagaatcgttctggggttgattcacgttattttgttcgttaccaaactgatccgtttgttgctgattattataatcttcagcgttatttgtttctgagttgctattgtcattctcatttgattgattttcattactattttcatcttccgagctatctttttgtgatttcgttagaagactatcatctaactcggttaatggtacgagtgtaccataataatcaatcacgcgttgatttaataattcatctttatctttaattttaggtaaatctaagtcacttcgcaacatatttgtcgttgacaggatattttttatatctggattatagtaataaatgccatttaaataatcatcgtcaccttcaagttgtgaactttttatttttatatcatcttttaaataagaagtagcaagtacttttatttcatcataacttaaattatgtttggcattttttccgacaatttcaacaacatcatctagtttattaaatgagtctgctttttgtgcttttgcaaatagttttttaattaaatccatttgtctctgaccacgttttaaatctgagtcttgatgacgtgttctagctacagccaatgcttcatcgccattaagattttgatagccttttttgactttaattttaccagtatcgtttgtatttggttcattaatgttgtaagggacgtcatatttaatgccgcccaattcatcaactgcatcaacaaacgcttccatattaattctgacatagtaatcgactggtaaatctaatgtagcctctactgagtccattgaagcagtagggcctccgtatgcatgtgcatgcgtaattttatcataataaccaacttttggtatgtagctgattgtatcacgcggaatacttaacattctaatttgttccttatctgcattaaaagtagataatatcattgcatcggttctagatttttcagctgtttgtccatttttttcacggccactattatcatcaattcccaaaaataggatagatataggatcttttgaaggatttactttagagtcacgtatatttgacttcctagaggaatcactatcattaaaggaagactcaaaagcgccttgagaagattttagcaatatgatcgcaaaaataattggaacaacgacaagaactaatgaaagaaatattaagaaatattttaaaaatttattcatgtttgaagctcccaaattattagattttttgtacatgtaactatatttatattttgattttacttctttttaactttgtaaattatttgtaaagaagaaaatgcactataaattataattttattactatcactaaaaaatatcaactatgaagttgttaattgtaattttattggcaatgtgtaataaaatgatgaaacaatatgcacgcagaagttatgtgttaatcataaatatacaatgcacttgtcatgtatgattaagtaaatatgattgtatttaatcaaatcatcatttatgaaatgatttaaatcattgaaagtggaaaggttaataaatataaaaatagtattacaataatgtcatttgataaaatatgatttatttaaagacataggatataatatatattggaaatatcatcttgtagatgattataattaaaagatgttagaaattttagattgcctttatacttaattatagcaagtgttgaaacaaatttaatcatattccagcataaagatataataaacgtactaggaatgaatgatttgaggaggaaatattatagtgaaagcactttggttagaaaatataaatgaaagtttagtaaaggatttttacgaaacacaaacagaagaagaacagaatgctggttttgaaggggtcttatcatttggtactgcaggtattagaagtacatttggtttaggaccagcaaggttaaatgcttttacagtccgcaaagtagcgctaggtttagctcaatatttaaatcataatgttgatgacgcatctgttgtcatacattttgatacaagatttttatcaaaagcattttcacaagagatggcaagtgtgttggcaaataatggtatcacagctattatttcagacaattataaatcgacaccagaattatcctttgccgtaagacatctacaagtaaatgcaggcatcatgattacagcaagtcataatcctaaaaattataatggtataaagatttataatgaaaagggtggacaattattacctgaagcttcagagcaattaagtgaatatataaattcaattgaaacaccattaaatattgaaaaaggtgattttaatgcgttcgtagaaaacggtaaaataaaatatatgtcgaatgaagtaacagaaagttataaaaaagaagttaagtcattagtaggatcaatagatgcacatgacgcaaaagtcatattgacgagtttacatggtacgagcctacctttggtatctgacattttaactgaattagattatcataattttgttatagaaaaagaacagtcagaacctaatggtaattttccaacagtagctattgctaatcctgaagatgaagcagcttttacacttggcaaacagctagcagataaaacagatgcacagcttattattgcaactgatcctgatgcggatcgattaggatttatagaacgttatggtgataatgattttagatattttaatggcaatgaaatagggctattattaatgaaattaaggttccaagatttaactgaagatagtacgccgcaatatatgatcaaatcaatagttacgagcgagctagcagaaaggttagcaacatctctcaatgtagaagttaacgatgttctgacaggttttaaattcatttcagatttaatagaacacaaacagaaagatgatgataagcaattactgcttgcatttgaagaaagtcatgggtacttagcacaacctatttcaagagataaagatgctatacaaatggtaccattattagttaaatataagaatttacttgataaaaacggtataacatttaaggaaacaattgaagatatttacgaaaatatcggttatttcaaggacagaacacttgcgcctacatttgaaggaaaagccggtgttaaaaaaatagaaagtattatgtcgcaatttagaaatgaacaggtattttctatatgtggtatggatgtactaaaaattgaggactatcatgttggagaagttagagacatgataacaggtcatactgagaaattaacattaccaaagacaaatttaattagatttatttttgaaaatggttttattgcgttaagaccttctggtacagagccaaaaattaaattatatttttcacttgaagttgaaaatattgatgaaattacacaacagtttgaagcaaactatattaataatatagtttaaacaaatatagaggcaacattatgacaacaaagatactcaaaaaaataacaatcattttaattatattattaatagtaattattattacaatcgcctataagctatatcatcgtagtcatcaagaaacgccaatggtacaaaatgagacgaaacaagaaactacgaataaacaaatgggacatttacagactattgtcgataatcaaaatccacagatgatgcagattaatcaatatcttgaacaagttaaatttaacggtactgcagctgtgttcgaaaatggtcaactcaaattaaataaaggatacggtttgcaaaacattcaagaaaataaacagaatcaagcagatactttatatttaattggatcttctcaaaagtttgcaacaggattaatgttgaaacaattagaaagcgaaaataaaattaacatgaacgattctgtaactaaatatttgccatggtttaaaatgaagcagccaattactttaaatcaactcatgttgcataaaagtggattgtttaaatataaagcttctccaaattataaaaatttaaacgaagcggtacatgcagttcaacaaaaaggcattgagcctaaattttacaataaaaataggtacaacgacggaaattatttagtattatcgcgtgtgattgaagaagtgacaaacaagtcgtataagaaaaattttgaggatagaatttcaaaaccgcaacatttaaatttcactgcatttttcgataattcaaattttcaagcatatatggctaagggttataaaaaggatggtaaatctggcaaaccactacaacagtatcccaacgttttagaacagtattatggggcgggtaatttgtacatgacgccgagtgatatgggaaaattgattttaggattacaaaataatagaatattaaacagccatatatcaaaaccactgatacatgagagtaagacgtctaaatatcctcaaccttatcgctatgggttttattcctttgcagataaaaatagaattaatggtggtttttttggtcaagtttttacgtcatattttaatgacaagtatattgtaatcctaggaactaattatgaaaatagtgacgtgaataatgaacagaaaatccaacatatttacaatcagattttaaaacagggtggaccttataatcatgtgggtaaatcatattaattgaaattttaaaacacacgccatggaaatgggcgtgtgttttttactaagattatatacagtattttaaagcttcaataaatagttttttgaaatcgtttgtttcgatagacataacaactgagcagttagggaagtgcgtgttaaaatctgtgacagttgcaccttttgtaagtgttccagtggtctcaatttgtacatctgcctctttcacatcaaatttttcaggatgtaataaataaagtatcgtatatgcatcatagacattgattcctttttcaaaatcgtcgcctttataatgtttgaaaagttgatgcaacatgtcaccggttttgtttaaactttgtaattcattcaccgttgcgtgactaagtgtagaacttctagctacatctaagccaaccattgtaattggtaatccagagttaaatacaatgtgtgctgcttctggatcacaataaatattaaattctgctaatggtgtgacattgcctcgagctgccgaaccacccattaatacaatttctttaatataatcttttacttctggataggttgagagtaatagggcaatatttgttaaaggtcctattggtattaaagtaatagggtcttcacttgattgaagttctttgcgcatggcttctacagcatgagtggatgataaatcattgtaattaatcttaggaaaatcatatccttccatcccagattcaccatgtactgcactagcatctacgatttctgataataatggttgagaggaacctctatgtacaggaacggtactcgagaaaaaacgtttaagtttcaaagcgttcgcagttgttttttcaatacctacatttccattaactgtagtaatcattcgcaaatcaaaattaggatgatttaatgcaatgctaatcgcagcagcatcatcaattccaggatctgaatctatgataataggttgtttcataattgaatttcctcctaaaaataaataatcatttaaatatagtgtacattgttttacctagaaaatgttgtatagcaattgaaaaattaagcgactattgatagaaatatgaggaaataatgttgtaaagacattccatagagcctaagtttagtttattagtatttattttgaataatctaggttagtttttaatattcgtgaagtattttttttagaaatcggcgtcatctaatgaaaatactatttgaaaataggggggatatgaagaaggaaaagtgacggtcagttgcatgtttgatttaccatagttaatataaacgattaatttagtgctttcttttcatacgaaaaatttataacaacaaaacatacatattttgaaattaacgaaatcaatatataaagagacccccctacacaaataaatgcgtaggggggtctctttgttctaaggcttctcagaagagaagtctatattgattataagtggcttgagtgtccaccttgcattacccaataagtaccgataacagtaattaaagtaatgataatcgcaaataaaactttaaaggtttgtaaattaccatctttactttcagttaagtgcatgaacattaataattgaactgcagcttgtataaaagcaaaaccaaagatgatggtaatcttagcattaagtgccatagatgtgtataaagttacaaatacagctaagatcgttaaaacgattgaggcgataaaacctacagtatgttttactattgtattcatccgctaaacaccatccctatcatatatacggcagtgaagatgaaaatccatacaacatctaaaaagtgccagtataaactaactataaataatttaggagcattgtctttatttaatccgcgcattgctacttgaattaataggcaaataatccaaacaatacctaatgacacgtgggcaccatgtgttcctaatagaataaagaaactagaccaataagaaccgatagttagattaacaccttcatgtacgtagtgcgcaaactcataaatctcgaagcctacgaataccataccaagtaatacagtgataatcatccaaatcagcattaatttttctttttcttttctcatatagtaaattgcaataccacatgtataagaactaattaataatgcaaatgtcataattaaaactaatggtaattcaaacaattcagtcgtcatttttccagcataatcgccaccgtgttgaagtgttaataatgttgcgaataacgtaccgaataatgagaattctgctgtaaggaatacccaaaagccaagtttatttaaattaccttcatgcgaacgttgatcaattgtgtttgcatcatgactcatgacttacagcctccctttcttttatacgtgcatcacgtaaacgtttttcagtttcagcaacttcagacgctggtatatgataaccatggtcgatttggaaactgcggtaaaccatagttgcgaagataccaattaaacaaataatagctggaacgagtgtttcaaagataaggaagaatccaccaatagtgaagagaattcccatccagaatccaacaggagtattatttggcatatggatatctgtatagttatggttgtctaaataatgacgaccatgttctttcatatctacaaatgtgtcatagtcattccagtctggtgtgatagcaaagttgtatttaggtggcattgctccagcagttgcccattctaaagtacgtcctaaaccatcccagttgtcgccagttgcttcacgtggtgctttgaagaagctgtatacgatacttgcaactaagaacataaatcctaatgccattaatagggcaccgacagttgagattgcgtttagtaaccaccaaccatcttctggcatataagtgtataaacgacgtggcataccatctaatccaaggatgaattgtggtatgaaacaaacgttaaatccgatcatgaataaccagaaacaccatttgtttaatgtttcgtttaacttgaagccagtcatcttaggccaccagaatattaaagctccaagacaggcaaatactacaccagctactagcgtatagtggaaatgcgctactaagaagtaagtattatgatattgataatctgctgccgccattgaaagcataacacctgttaccccaccgattaagaagttcggtatgaaccctaatgcgaatagcattggagattcgaaggtaacacgccctttataaagcgtgaacaaccagttaaagattttaacaccagttggtataccaattaacatggttgaaattgagaagaatgagttaattaatgcaccattacccattgtgaagaaatggtgaacccaaactaagaaacttaagaatgcgatacctgcagtcgcccagaccatgctttgatgtccgaataggcgtttacgtgcaaatgtcggaataatttcagagtagataccgaatgctggcaagataacgatatacacttcagggtgcccccatacccagaagaagttagcccaaagcattggcataccaccatttgcaactgagaagaatgctgtgtcgaaaattctatcagttgtaaatagcgctaatgtaactgttaatactgggaaagcca

SEQ ID NO: 13 - DNA, 10145 bp, Staphylococcus saprophyticus
gcagtgcaagtgcacaaggtactgcagatttaaaagcacaaacaccttggtataactatgaaggttatacgacttatgatccgtccttcacacaagattataacttcgtgcgtgcattaaaatatgacaacgtttcaattgatggttataaagtagatacagatgctaagaaagagtttgaccataataagaaagtttatgatacgacagtagaatttaatagtgataacgaagtcgtacaaatcactttcttcacgaaaccagattcagtatctaaagcgacattcaaaaaagcgcatgcatctaatgaaattaccgaggaaggtaaattaggtaataaagatggttcatatgtcaaatatgcgacgaatgatggtttctatatagcattctttgatcaaaatgacagattaatggaagtgacaatcggacaataaaaggtatctaaacaatggttataatgattggaagtgagattaaatgaacaaagtagggaaattactttcagcaaccgtcgttgtatcaacacttgtcgtcggatcttcagcagcttatatttcaacgaatagtacggatacacaagcagcagagcaagtacaaaaatgggggcatggtgaaggtggcgcaagcggtgcaagtgcacaaggtactgcagatttaaaagcacaaacaccttggtataactatgaaggttatacgacttatgatccgtccttcacgcaagattataattttgtgcgtgcattaaaatatgacaatgtgacaattaatggctacaaggttaatccgcatacagatagagaacctgttcgcagtgaacaagtttacgatacaactgttgatttcaatagtagcgatgaagtagtcggtattacatttttaacaaaacctaatacaatatctaaggatacatttaaagaagcacatgtctctaatcaaattgttaataaaggtgaagcagacgaaggcacattcttagaatatcaaaccaatgcaggtatatacacagcatattttgataaaaatgataaattaatgaagataatgattaattttgaagattaatgattgtatcggaaaggccaagtcatatacgagtcatttaagtatttgtttatgagcgagattgagaaatcaaatgtgaatatttggtttctttctcgctttttatgattttcttaataaagatattaaagttataattataaatagataaaaatttttaaatttaaaaaggggaattttcaatgataaatcaatatataaagaaatggtttattgcgtttgttttgagtggtgtatgtttaataggcttatcatcgatgcataatacaacttttgctaaagacatagatcaaatagaaaatgaatacaatactaaagtagggatttatgggattaatacggaaaatggcaaagcatatcaacataatgcggatgagcgatttgcttttgcgtcaacatataaagctatagccagtggtatattattgaataaagtagctccatcagaattgaataaaaaagttgaaatcaatgaatcagagattgtggcaaattcaccagtgactgaacaatacataggtaaaacaatgtcattaaaggctttaattaaagcatctatgttgcagagtgataacacggcaaataataaaattatgcaagaattgggtggcgtcaacggtttaaaacatgagttggtgcaattaggtgatgatgtttcggaaccacaaagattggagccagaattaaattattttgatccaaatagcaaggcagacacaacgacaccactagctgctgcacaaacgctaaatagtattttaactagtaatgaaatgaatgaatctaacttatcattgttaaaacaaacaatgatagaaaataagacaggtgatactttgattaaagcgggcatgcctaacagttatacagttggtgacaaaagcggacaagctttaacatatgcaacacgtaacgatctcgcttttatttatcctaaaggacaggataagccaattattttagcaatttattccaaacaagatcaaaaagatgcgaaacctaatgataaagtaatttcagattctgccagagaagtgattaagtatttaaagtagcgcaataaaggcgtataattataagttaaacaaagggtaattcagaggagattaaaatggaaattaagcaaatgaaatattttgttgaagttgtaaaaaatggtggcatgactcgggcttcaaaacatttatatattgcacagtctacaattagtaaaaatattaaaagtattgaagacgaatttaatgtcacgttgtttgatagaagaaagaaacatattattttaaccgatatcggtcaaatattttacgataagtgcgtagaagcattagcgatattagatgatttatcacttgaaatggatgatgtcacaaacatagagcgtggtcatatcaggctaggtgtctcagcaattatggatgtacgtttgttcacagaaagtttgaatcaatttcacagtatgtatccgaatgtgacgtatgaagtagttgaaggcggcggtaaagcggttgaattttatttaaataatgatgaaattgacgttggtattacaacattgccagtcgacgatgacatttatcacgcagtccctttatataaggagaaattaatgctcgtagttgataaaaattctaagtatgcaaagcaatccgccgtatatttaggagatttgaagaatgaacgttttatcatgtttcatgatgattattatattaaagatcaaattattgagagctgtcgaaaagtaggcttccatccaaaagtggtagcgaaaatggcacaaatcacgtttattgaaaatatgattttagatggtatcggagtgagtatcttacctgagagtattgtgagtattttaaataaggatatcactggtatcgaaataacgggtgcagatgtgaattggaacttaggtatcatttggaaaaaggaaagttatatcaattacgtcacgcgcgaatggattaactttttaaaaagttatagataatgccatataattaaagtgatatgaaatcatcccaaattacgtatgctgatagggaatcttcattattccaactatgtattttgcgcataggtcgtggcgtattataatagggtttgtagagggttatgtgcactgattacctaagcagacaaatactttaaagtaagtcttcacgaagtgtttatgacgtcaaacagcatagatacacattatataaaacgcacgtgatacatgtcagactccataacttaaaaaagatactaagtaagcttgtaagcatatgatgaaacggatgaatgttgcatgacacagagacggtgtgatggcattaaatttgatattgctttgtaaccccttatgcgaagaaattatcgagctctggataatgtttgttaatatcatgttcacgaaatataagttgaaaccaaataacctaagttttctcccaaaattaaaacttaaaccccctcaaccaaaacgatcattggtggctatgtttcgatacaatctttagtctttaacatgataggatctacaaatgttatctttcatatgtatacagacagcttttattttaatatttatatgtaaaaaaacaatatttgggtatgtgacggttacctatcgagttatcgctacacacatcgatcaatgtctcatacgtactttaaccaaaatgaagttaggcatgtaaatattttgaaaacttatatttttgttgcgataaaaaagaaataaccctctagatatgataaatatttctcaaataaatgagcccatcactacactgtccatgtagtattgggctcatttatttatgagggatgttagcaatggtaaactcaattattgattatgacttaatgatgggtgtaggtgataggtattttctattggttcacctttaattactttatctaagatagcaacaacttgttgtgcaatttcagcagtaggtacaccaattgcttgtacaggataatcaatttttttaatttgtggaatattatcgtaagagtatatgattggctgttcatcagatcccatagcgttgatcgtccctactgtgatatcgtagcttccacatataacgccaggtgccaacgatgattcctgaagaaagtgtttaactgaggtctcggcttcaatcgcatttaatccgctcgaatcaatcatacgatattggatgtgatgctgttcacaataatttgcaatggcatcttttttagcaatttggcgcgcgtcattggtgcgaatatcaccgatataatctatacgatcaataccttttgcgagtaattccttaatggcgataatcattgcttctgcgtgatttacattaacaattggataaggaatatcacgatcaacgccatatgctacgacgggtacattgttgtaaatttctggaggtaagttcgttgtttcatcctcatcaaaaatgacaatgccatcacagccaaattcgacaaattttttcgaagcggcagcaacatcatcaatcgacacaaacatgacataacctaaggatttaatggctaaattaatttcagtgatgaggtgagttacggcaacacggtcgacagatggccatatcaatccaatcgtaccacttttcttagaaacgagtgctcttgcggagtgattgggaatataattcatttcaagcgctttttgttgaatcatttgttttgtatttggtttaacaagttgggaattttttaatgctttactaactgtggaatagcttacgccacaggcttcggcaacatcttttaacgttactgccataaaatttctccttgaaatagattgatttaagttagaattaattataccatagaggtaagcgttacaatatttttttgaacattaataacaacgttgttattaatgttcaaaaaattaaaattctatcaaggcgatgacaagatgaaatccacagagacaatgaaagcaattcaacaagggcaacatatcgcagtcatgcgtacagatgatgcagcatcattttttagatattgccaatacgattattgataaagggctaaatattattgaagtgacgttaacaacgccgaatgcgatagatatcattgccgaattatcaaaacgagatgatgcattgattggagcggggacagtactcgatagtgtttctgcacgaacagcaattttaaacggtgctcagtttattgtgagtccatcttttgataaagaaactgctaaaattgctaatctctatgccgtaccatatattccaggatgtatgacagtaaaagaaatggttgagtcattacgctatggttgtgaagtattaaaattattcccagcaacacaattttcacctaaatctattaaagacttaaagggccactaccacaaattgaaattgtacctacaggtggggttggtaaagataaccaaaaagaatggttagatgcaggtagctttgcagtaggtataggtagtgaaatcacgaaaatctatcaacaacaaggtaaagccgcattagagcaatacgtagcagaattaaaaagcgagggataatttatgacggtatatggatttggcgaagtattactgcgctataccccgcctaattatgaacagcttaaagatgccaatacattgggggtaaacgtgggcggtgcagaattaaatgcacttgtaacactagctcaatttggacacgcaactgagatgttaacggccctaccaaatcatgctttagggcaattagctttacaaaaaatgtatcaatcacgcgttggaacacagttaatacaacatgtagacgggcgtatggaaacatattatatggaagaaagctttggttttcgaagtggaaaggtgatttatgatcgagagcattcaacatttgctgaacaaggccatgtggtaatggatgatgtatctattaaagcaggtgactatgtgatattgactggcattacactggctattaatgaaaccattcgtgaacaaatcgtagatatacttaaaaagcttaaagcgcaaggcaaggtgcacatattgtgtttgatatcaatttcagaagtaatttatggtcaaaagacgttgcggttccagtaattaaatccattttacctttagttgatgtgcttttctttggtaaaaaagatgcaacgcatttacttgagacaaacgtagaaagtgacgacatgaaggcttgtgctgaaacgatacaacgacaatatggtatatcactcatggcatcaagtaatagagacattgaacagagtaccttacaaggtgttgtcctatctgaaaaaggttatttagaaggcgagtcataccagtatactgttttaaaccgtattggcgcgggagacgcatttatggcaggcgtgttgcatggtttaatcaaccaattgggagttaaatgaaaccattgattttgcgacgaaatgtgctgtcttacaacatacaacaaatgaagatgcgctagcagtggatgaaagtgatgtctttaaattggcatcgcattttggagaattaaagcgttaaacacattacattttatgaatgactaaactaacacaaaacgcttttatgtaagcgcattcaactaaaatatgtgaaacttgaatgagtgtaagttaatttgttttcgacgagtgcgctagatattgaaacagaaaataaaattcaaaaagcgtttaaaaaactttcagaacacagaacgtctttaattattgcacatcgattatcgacgattaaagatgtcgaccgtattatctttattaaagatggtcaaattttagaagaaggaagtcatgatgtattaatgcagcatgatggtcaatataaacaactatacttatctcaattctcagatgttgaaacgttttaaatataaagagaggacccatccattatttgtaatggatgggtcctctcagactttgttggcagttttttatgcacgctctccgcgagtccagccttagcctgtagtctgcggctagtgctatttccgcagtagtcagcataaatcaattgataaaagagattaatatgaaatgctttctatgatgaacctagatattcatatcttatgcattcactttttatgaaaatatttcagtaattatgcttcagcaaaattactcaggatgtgcttctgcatgaaccgtaattaaatgtttgaagtggttatcgtaagcttgccaatctatgttcttgttggtttgatcagtgattaggacatcaattgtatcgctagaacaaacattgtaaagtgatactttatcaaatttagagctatcagtgagcacataaacggctttagcttgtttcaccatttgtattttagtagaagcaagtgtgtcattaaaatgtgtaatccctttttctaaatcaattgcaggcgtcgctaaaaataatttagaagggttaaataattttaatgtttcgtttgtaatcatgccattaagtaaataattatcttgatataaaatgcctccagtgacgataatctgattggcagttgattttaaaatcgaagcgatgtgaatgtcgttcgtgatgattgttaaattacttttttgtgtaagtgcacgtgcaaagtgaatggtcgtcgatcccgaatcaatgaagagggtgtctccattttctacgaattccgctgctttaagaccaattgctactttttcatcataataacttgtttcacgatcatcaaaattcaattcatcccatacttctgaatcgttcaacacgacgccaccatgcgtgcgcttgatctggttgtattgctctaacttatttaaatcacgacgaatggtcgcttcatgtacattgaattcaagcgctagatcatgaatggtcgcttttttattggtttttaaaaaagtaatgataaattgttcgcgttcagctggcaacatcgacgacgcctcctaaatgatgattaaattttcaaatagctatgctgtttcatgttcgccactttgcatatgctttggcattttaataaagtaagtcagaatcgtactaataaagtatagaattgcgagtacccaaatgacgccgattgcttgtatgctgccaatgaataaatagacaatcatgggtccgacaaatacaggtaatcctgcacctaaattaagtacagacaaagccgcacccttatcttgtttaacaagtgatgggatcaatgcggataatggtacataagcagcgataaacgcaccccaacagaatccgactacagttaataggacaatgttaccatctgtccaaatagggacataacccattaataaaacagaaataccgctgccaataccaccgaaatacatgacggtattacgccaaccaattttatctccgacgatgccaaagattaagttaaagatgatgttaccaacgaaaatcgttgaccataccgcaagccatttcgaagtgggtatgccaaatgatgaaagatagattggtaaaaagactggaaaggcaaactgtgctgtcgtattaatcacacgaacgataccacctaataatactttcggttcatctttcataatcgttatgcctttaagtatttcttttaatttttcttttgaacttccttgattagatggcaatttgtctttgttcaagactaaagtgaagaatccaccgagtaccacccagaataatgagctccataatgtattgatatggcctaaatactcaattgcccaaatagaataaagcgcacctaatacatttaagccaccggtaaatacaaaccagaaccaacctacggctgcaccgagtgtcttttgttctgaacggtaagaaatccataccaagaaggaataagcaaataatggataacctaaacctctaagtgcgtatgcaggtaacatgagcgcaagattttgtgatggaattgcaaatccgacaaagaaaattgtaccaataatatagaaggttaaccctagcatcattgttcgtttaccgccgagtgcttcggcaaatacaccactaagccaacttgctaatgcaactgttacgccatatgcagaaaagagtaaacttgtttcttgaaccgaaaagccgtgaccgtgtagccatggacttagccatccaatttctaaaccatcacccatcatgaagatgataataccaatatagccccatacaatttggcgaggcatgcctaaaatcgaattcgaatgattcatttatatataccaccttttcagtcattgtttaccaatgatattgtaaataagtttttttccatcctttgtgtgctgcagtatcatccatggcttcttttaaatctgaagtatcatgaatatgacagtaagtctctggaatcaattgtctcaacgcttgttggtactgtttattactaaaggcatgaatgagttgctcgaattcacgttttgtactacgtgaactacccgaaaatgtcagacctttttcaagaacatctctggtgttaataccaacgcgttcttccgtgacacccattaatacaatatgcccctgtctatcgatcaaatcgatggcttggttaattgcagattctgaaaatttaccacccgtacattcaaaaacagtatgtacgccacgatactgattgaaatcgaagtcaaatacgagatgtgttgtggcaaagtcttcaaaggcagctagtttttcttgaactgcaccaaatacaattaaatttgctttatcaataccataaatataatgtaaggcagttgctgctaaataaccgactggaccatctccaaagatcgcaacttgtggggacgtttcagttgttatctcgtcaagttggttgattggaaacagtgatactgaacataactcagcaagtaatacgacatcttcatctaaatctgttggaacttttacgacattatcgccagacaccaccatgcgatcttggcatataccatcaaatccactgcccataaatacggcgttttcatcataattatcttggaatgaagtcgttggatatgtacctttacgtaagtgagaagggatatttggtacaatgacaactttatctccttgttgaaaatcaggatgtttagaatcttctacgataccgataccttcgtga

SEQ ID NO: 14 - DNA, 4294 bp, Staphylococcus saprophyticus
ggaaattatagtgacaacgccacatccaacagcagcatttgtcgcagcccgtgctggcgcaatggctaaacatacagaacattctattctaggtgtaatcgaaaatatgtcttatttccaaagtaaagaaacagggaataaagaatatgtattcggtactggtggcggagaaaaacttgcagaagaactacaaactgacttgctaggacacctcccgttagaacaaccatcttggaatccaaaagactttgcaccttcaatttatcaagctgatgatcgactcggtgaaatctatcaatccatggcacaacaaatcattgataaaacgacaaaataagtcatttcagtaatggatagagattattttaatttctatccatttttttattgcaattttttaaaatggtggtagaatagtttcttgtggcaaacaattgctactaaataagtgaacgaaagaaatcacaaaatcttaaattaaatattgactttccattgaggaattgatattatttaaaagtcgttaaaaacggcaataaaattatttaaagaaattataaaaagtgtaaaaaatatacttgaaataatcttaataataatttaatattattaaagtaatgttaattactcatttaaaaaatattatttttttgttgacaagttgttaacaaaaatggtatagtaatgaaacaactatttaaatgaacattgaaaactgaattgcaatatgtcaacgttaattccgaacacaacattaaattgttggttcaaaacaagtgttagagataacacaaattagtattttatgagctaatcaaacatcataattcatttatggagagtttgatcctggctcaggatgaacgctggcggcgtgcctaatacatgcaagtcgagcgaacagataaggagcttgctcctttgacgttagcggcggacgggtgagtaacacgtgggtaacctacctataagactgggataacttcgggaaaccggagctaataccggataacatttggaaccgcatggttctaaagtgaaagatggttttgctatcacttatagatggacccgcgccgtattagctagttggtaaggtaacggcttaccaaggcaacgatacgtagccgacctgagagggtgatcggccacactggaactgagacacggtccagactcctacgggaggcagcagtagggtatcttccgcaatgggcgaaagcctgacggagcaacgccgcgtgagtgatgaagggtttcggctcgtaaaactctgttattagggaagaacaaatgtgtaagtaactgtgcacgtcttgacggtacctaatcagaaagccacggctaactacgtgccagcagccgcggtaatacgtaggtggcaagcgttatccggaattattgggcgtaaagcgcgcgtaggcggtttcttaagtctgatgtgaaagcccacggctcaaccgtggagggtcattggaaactgggaaacttgagtgcagaagaggaaagtggaattccatgtgtagcggtgaaatgcgcagagatatggaggaacaccagtggcgaaggcgactttctggtctgtaactgacgctgatgtgcgaaagcgtggggatcaaacaggattagataccctggtagtccacgccgtaaacgatgagtgctaagtgttagggggtttccgccccttagtgctgcagctaacgcattaagcactccgcctggggagtacgaccgcaaggttgaaactcaaaggaattgacggggacccgcacaagcggtggagcatgtggtttaattcgaagcaacgcgaagaaccttaccaaatcttgacatcctttgaaaactctagagatagagccttccccttcgggggacaaagtgacaggtggtgcatggttgtcgtcagctcgtgtcgtgagatgttgggttaagtcccgcaacgagcgcaacccttaagcttagttgccatcattaagttgggcactctaggttgactgccggtgacaaaccggaggaaggtggggatgacgtcaaatcatcatgccccttatgatttgggctacacacgtgctacaatggacaatacaaagggcagctaaaccgcgaggtcatgcaaatcccataaagttgttctcagttcggattgtagtctgcaactcgactacatgaagctggaatcgctagtaatcgtagatcagcatgctacggtgaatacgttcccgggtcttgtacacaccgcccgtcacaccacgagagtttgtaacacccgaagccggtggagtaaccatttatggagctagccgtcgaaggtgggacaaatgattggggtgaagtcgtaacaaggtagccgtatcggaaggtgcggctggatcacctcctttctaaggatatattcggaacatcttcttacgaagatgcaggaataacattgacatattgtattcagttttgaatgctcattggagtattcattgcataattttgtacattgaaaactagataagtaagtaaaatttatgattttaccaagcaaaaccgagtgaattagagttttttaacaagctttgaattcaaaaagaaataatcgctagtgttcgaaagaacactcacagattaataacattttgggttttcaaccgacttgttcgtgttgaaagtcaaaaaagattaagttattaagggcgcacggtggatgccttggcactagaagccgacgaaggacgttactaacgacgatatgctttggggagctgtaagtaagctttgatccagagatttccgaatggggaaacccagcacgagttatgtcgtgttatcgatatgtgaatacatagcatatctgaaggcagacgcggagaactgaaacatcttagtacccgcaggaagagaaagaaaaatcgattccctgagtagcggcgagcgaaacgggaagagcccaaaccaacgagcttgcttgttggggttgtaggacactctatacggagttacaaaagaacagactagacgaatcatctggaaagatgaatcaaagaaggtaataatcctgtagtcgaaagtttgttcactcttgagtggatcctgagtacgacggaacacgagaaattccgtcggaatctgggaggaccatctcccaaggctaaatactctctagtgaccgatagtgaaccagtaccgtgagggaaaggtgaaaagtaccccggaaggggagtgaaatagaacttgaaaccgtgtgcttacaagtagtcagagcccgttaatgggtgatggcgtgccttttgtagaatgaaccggcgagttacgatttgatgcaaggttaagcagtgaatgtggagccgtagcgaaagcgagtctgaatagggcgttgagtatttggtcgtagacccgaaaccaggtgatctacccatgaccaggttgaagttcaggtaacactgaatggaggaccgaaccgacttacgttgaaaagtgagcggatgagttgtgggtagcggagaaattccaatcgaacctggagatagctggttctctccgaaatagctttagggctagcctcaagtgatgattattggaggtagagcactgtttggacgaggggcccttatcgggttaccgaattcagacaaactccgaatgccaatcaatttaacttgggagtcagaacgcgggtgataaggtccgtgttcgaaagggaaacagcccagaccaccagctaaggtcccaaaatatatgttaagtggaaaaggatgtggcgttgcccagacaactaggatgttggcttagaagcagccatcatttaaagagtgcgtaatagctcactagtcgagtgacactgcgccgaaaatgtaccggggctaaacatattaccgaagctgtggattgtccgtaaggacaatggtaggagagcgttctaagggcgttgaagcatgatcgcaaggacatgtggagcgcttagaagtgagaatgccggtgtgagtagcgaaagacgggtgagaatcccgtccaccgattgactaaggtttccagaggaaggctcgtccgctctgggttagtcgggtcctaagctgaggccgataggcgtaggcgatggataacaggttgatatttctgtaccaccattattcgttttaagcgatggggggacgcagtaggataggcgaagcgtacgattggattgtacgtccaagcagtgagattgagtgttaggcaaatccggcactcttaagattgagctgtgatggggagaggaaattgtttcctcgagtcgttgatttcacactgccaagaaaagcctcta

SEQ ID NO: 15 - DNA, 19217 bp, Staphylococcus saprophyticus
catcgctaagtgtaccaaccagacggtttagtttcaagttttataaatataaaaaataaggataaacaacattcaaaagttgattatccttatactatcagtggtttacatgaattaaacattttattatttttttattaatttagaacatttagccattgctttcttgatttttattggggtgcgtatattcggttaatctattcaaaacttgttctctcatgttttcatcaagtccatctagtccaaatatttctgaaagccacaaaccatccactgccagacgaataattgtagcgtctactttgtctaatccatcattttcaatattagtttgccactctttataagtgtcctgtaaaggtaataacaaattgctattaataccttgtgcagcaagcattcctgaggtaatcgatccattttctgaacgatgagatctcgtcgcttcaataaacgcccgtgcccatttcccttggtcttgtttatctgcatgtacatgtccattcacattttctctatataattcatcggcatgatcaacaagaccttgaattaatgcaaacttgtttttaaagtgatacaatagcccacctttactgacacctgcctttttggcaacggcatctagcgttaaatattcactaccttgctcatctacaattgctgcagcagcttgtagtaattgtatcctcttggaaactctcggcattcatacaccttctttctcaaaatacgtttcaaaatatgacttaaccgtagttttatattcgagcaaactatatacgatatatgataaagttgcaacttcatttttggatgctaaactaaaatgtgtgctattttatcataactcaagcgttaaccttcataaggcaatccgctttgtatttttgcatacgtcgttcacatgataacttcttttacttatacaaatgctttcaagtatttaatcattcatgcctttgccatccaatatataatcaatatatttttctactcgattttcacgtgttgccgctctctttgcctgaccaatatgatacatatattgcctttgtctaccaggcgttaagttattgaatgcttcttttaattctggcattgcatctaattttgcttgtaattcttcaggcatatcatagtcttcagtttttttcataggtactttcttacctgatttttctattctaatcgcttcttcaacataccatttaatctcgtctctacgttgattaacttcatctaaactttcgaaacgtaattgtcttgctgcttgtacatttttagtttgttgtataagtgattgataaggatcttccataatagcacctttttcaaaaagtaatgcgcaataatgcttaaagtcttgtatgataacgacatttttatcatctaacgtgtagcaaggatgcatccatttataatcttcagttaattccgtttcatttataatttcacgtaaaattttaaattcctcttgccattgtttcaatctatcaataaatgcatttactttaatattttctttttcattagtcataaaaattacacctcttaataatttttttattaactttattctactatgaaaaccttttatttatctataattagctttttcaaaaacttaactcttgttttccgataagtttactatgaattaagggataattatgttataatttttttattatttttaaaaatacatataatttagaggtgattgaatgcaacaagcaacaaacttaaaaaaagtattaggctttacggatgtaatgggtattgctataggtcaaattatcggtgctggcgtcatgtcgctaacaggcattggcatacaaatgaccggaagtggtatcacacccgcatttatcttatccgcaatcattacattactaacgatgttcccaattgccatattaggatccacattacctacgactggtggtatgtatcagtatacaagtcgtttattgtcccctaaaatcgggatattttggctattattattcatctttttacaggttacattatctttatatgctttatcattcgcacaatacttagaaggactcttaccaggtattcctgttagacttgttgcttttgccttacttaccattttatttattgttaatatcattggtattaagtcagcatctatcattggtaatttaatggttgtcattctaattattgctttgtcttgttttatcattttcggtctgccacatgtggattttggtgtttttaatatgcatgccatgcttccggatggattcacaggattctttactgccgttgggcttgtttcgtttgcaactggtggcgcgcaagttgttgctgaactaggtggagaaatgaaaaatccaaaaagagatattccaatagtcattatcattgcaactatatttgtaggtttgttatacgcttttatcgcttctattgctgtaggggtactaccaattccagaggttgctggcagaccattaacgagtgttgcgcaagaagtcttgccgaccccagtattcatcttcttcatggttgggggcgcaatgttcgcattagcgactacactcaattcaacgtttacttgggtaactaaaagtttattagttgcaatacacgatggttatttacctaaacgtttaggtagtgtgaacaaacgatttggtacacctcattggcttttattacttttctacattattggtgcattacctattattacaggtatgtcactaaatgttgtagcacagttaggtactgggatttcattaattgtttttgcttttccagctttagcttctacgcaactacccaaaaaatatccagatgcttataagcaatcgccatttaaagtaccctatccaatacttgtaacgatggcaatcattgctattattgtgctattgtatcaatcttatttattaatttctgatttaaaaataggttatattattggtacattaatttatattttactttccgctattattgcgcaagtttctaataagaaaaataaaattgcacttagcgatattcattttaatacagcccaatcaatagaaaaatcaactttataaattaaaaaaaggacttacatcctctcttctacattgagaatgtaagtccacttttatatacaaagcactgttcattttataagtgtaattgatttaccttaggctctattaaatttagtcatttgctttagactaatgattaaaataaaagctacgaatgcgatggctgcagtgaagtacgtagttgctaaaacatctattttagaaacaactagaccaccgacaataccaccaatgccgatacccgcatttaaactagacatattccaactcatcacttggcttgtatcaccttcaacatgttctataataccactttgaacagctggatttgtactccattgcatgatattccatatgaagataatcattaataatacgcctgtcactgataagaataaattcaacagtaacatcatcgtgataaatataatagtggcaatcgttagccaacgtttactcgtcaatttatctgaaaggaacccacccatcgatgttccaataacacctgcaacaccattgattaataatacaatcgatacgaaggataagtcatgaccacttgataacataagtggattaatataaataaatgtcacagaatttgcaactagcaataagaatgtgatagctaaaaacttagcgacttctcctggtctaagtattttagaataattactttcacgctgcttagtactagactctgtatttaccgtttgatattgaggttgtggtacatagaaatacatcaatatacctactaacacacttacaaagacaataaataagaatgtatatctccatccaactaagtcaccgataattgtcccaattggtacaccaagtacatttgcgccactaaagcctgaataaacaatacctatcattttccctcgatgttgtggcgcagttaataaagctgttagcgctaatattttaaccacgataagtgctgctgctgcagatgatatgatgcgtccaaatactaaaatagaaaaattaggtgcaaaagcaatgatcatatttccgacaataaaaacaagcaatgcatataataatacaggtcttggagaaaaccgattcgttattttcactaatataggtcctgcaatggcaaatgtgatggcataaagcgtcactaactgtccaataatcgcttccgaaacatgcaagtcaatgctcatcaaattcataatccctgcaaccatcatttcaaccatacctacgataaagatactcaaaataaaggtggcaattctcataatcgacatcttttcactcctcccttaaattaagatgtaaatttttacataactattacattataaaccatacgtcaacacatttgaacacttctgaatttgctctcacagcaaatatccaaccatacaaaaaaagaacctgagacatcaatagatatctcagattcgtgtttatattgaaacataacaataaagctctgctcaattctttttaaaatttttattaaaatgctgaacagtgctttttatactcgccgtctatccaatatttatgcgtcttcttggtttaaatgtctacttatcagttgatcgcggtgattaaagaattgtttataacttaaataagtcgcaataagcgcagacataatcgtcgcagttgtgtgaataaagacaaccattaattgaaatttaacagcttgtaacggctctacgcctccaataattaagccggtcatcatacctggtatcgaaacaataccatacgttttaacggaatcaattgttggtacaatcgccgttttcacactattacgtatcgtttctttagaagataatttgggattcgcaccaagtgctaacttagattcaatttggctcatttctttcacaaattctctatctaaattttgataggctaaatttatagcaattaaaccattactacctagcatacctgcaatcggtatcacttcattaggcttaaactctatcgcccctgttaaaacgacaccaactagaggtaacgctacaccaacaaaaatggcaacaaacgaaatccaaaatacatgatgcattactggagatgctctactaattgtattccacgaagcattaataataatgactagtacaaatacgattaatagccatgtttgattcacaccaaatataaaatgcaatagaaagccgagaataattaattgaataattgctctaaccgtcgcaattaataaatctttaataatatgtaatttttctttgtaagaaacaataatcggaaaaagtaagaggagacccgttaatgctagtgcagttgtactcatgataaacgctcctccttatcgattttgccatccacaattctaattttctttttaaaatgtctattactttgatcattactatgtgtaatccataaaatagcaacgccttcatcagccaatttaaagattaaggattctattttttcactattatgcacatccaaagcacttgtcgcttcatctagaagcaatacctttggtgtgtacatgagttgtctcgctatcgtaatacgttgtctttcaccaccggataaatgttcaacacgtgtattaaaattataatgacctaaacctactgttttcaataaacgtttagcttgtttacgatcgaatttatcttgtctaacttctgctggaaaagctagattttctccgatagttctatcaaataaatcactttcttgtaatagataacttacattcatacgtagttgttctgggtttatttgttcgtaaggcttatcatttaaatatagttctccttttgttgggctaatcaaattactaatcaaacgcaacaatgtacttttaccacttccggaaggccctacaattgctatcgtatcgcctgcctcaatttttaaatttatatcattgataatatcccggttatctatcttatatgttatgttttttagttctaacatagaagcccaccttttttaatttctcgcattactattccctaacttttcaattttaatagcttgtttcatcaataagctcaaaaatcatttattttaaaataacgatagctataaatgatatgagattatttaatgcatgtaatgttattgaaacagccaaattcattccgctcttcacatatacaaaggctaaaccagccccaatgatgagataactaccaatttcaaatggtgatgtggcacctaacacatgcacacttgcaaataatatcgttgagagtatcgaggcaacagtatatgttatctttttgcctaactcatgaataattaaatgtctaaataatagttcttcgatgattggtgtgagtatgacaatatctataaatagaaatggtaacatccaattattttcaaacattttttctaaaagcatttgattttgagtttctgtatattgcaatcctttaggtaaaaattccatcatccaatcatataaactatttaatccaagtgtgacaatataagtcgccacgatgataaacagatatttagggattgcatgaatgcgttggttggaaatcggtattaaacgatcttttaaatgcattgcataaaaactaactaatataacgatttcggcaagcaagccacccataattagtatgttttcatcagttacaaaatcttcatttttaaaattaaatactgaatagacaatatatatagcagcaaataacaagagtggcatgatgttattcgctaataaataaattggaataagccaaaaatctctttttacaatttttttgttatcccaaacacttttatcttgctgattattattttttaattcggttgatttctcagtcatatgacaccttcctaattcgtacatatactaaatatatcatgtctacttatagtgtatatacaaattattaaattttttatcaacttcctttctaaaatattataatatcaaataacttacgtattcaactcactatattattgtaatatgttcattttgttgtactatataattaacataaggggggctgatttttatgactatattaactacattgcaatttatcgttaatattataattgtattctttttatttagtgttctggtaatgggggcagtgttactttttaaagataaacgacaaaagcaacatagtgtgctacgcaattatccactacttgcacgcatacgttattttggagaaaaaattgggcctgaattacgtcagtatctatttttggctgataccaaaggtaaaccattttcaagaaatgattttacaaatattgtcgttgcgggtaaatataattctagaatgacaagttttggaacacaacatgattatgaagatggtttttatatacaaaacacgatgtttcctttacaaacagctgagttacatatcgaccaatcacctatgatttcttcttttatttataaaattgataacgaacgcttgtttaaccgtgatgaacatagaacaaaagttgaaatagatccttactatttatcagatgaagaccaaattatattaggtgctcaacttgagcatccatttaaaataaaacgtttagtaggtcaatcgggtatgagttatggcgctttaggtagccgtgctatcactgccctttcaaaagggctgggtcaagctggtacatggatgaacacgggcgaaggtggtttatcggaacatcatctatctggaaacgttgatattatatttcaaattggaccaggcttatttggtgttcgtgataaagcaggaaagtttgaccaacaagcctttatcgatttatcccataatcaacatattaaagcatttgaaatcaaattagcacaaggcgccaaaacacgtggtggccacatgcagggcaacaaagtcacagaagaaatcgcttctataagaaaagtagaaccttggctgacaataaactcacctaaccgttttgagcatatcgacagtctagatgccttattgaattgggtccatgaattacaacaaaccggacaaaaacctgttggctttaaaatggtcattagcaaagtatctgaagtagaaaaccttgttcgtacaatggttgaaaatcagcaatatcctaatttcattaccatcgacggaggagaaggcggtactggtgcaacattccaagaattagaagatggtgtcggcttacctctatttacagcgcttcctattttaacagcattattggaaaaatatggtattagagatcaaattaaagtttttgcatcaggcaaattgataacgccagataagatagctatcgcattaggacttggcgcagacttggtaaacatcgcccgtggcatgatgattagtgttgggtgtattatgagccaacaatgtcatatgaatacttgtccagtaggtgtggcaacgactgatcctaaacgtgaaaaaggattaatcatcgatgagaaaaaatatcgtgtcactaattttattacaagtttacatgaaggcttgtttaatatttctgcagctgtaggcgtagattcccctacaaaaattacaaaagaacatattatcattaaaagtaaagatggtggtatccaatctatacaggactataaattaaaattgattgaacacgcttaactgattaagttcgctaaagttaaaataaataataagcattgaactactcaatacttttgcaatttacatgatttaattcaagctaacccaaaaaaagtctcaaacgttaaaatgatcactttaacgcttgagacttttttattttatagattactttaatttagaaatagcttcatttaacaatgactcaattttatcttgttcatcttttaaggggttaaattcaaatttttcgttattaataaatacagtgggtatccctttaataccgcgttcaaatgtttcttcattgattgctaaagagcgttcatctgcatctttttgaggtgttaaattaaattcatttgccattttatcttcaacagtggcaaaacttactttccattgatcttgtgtatcgtataattggcgaataattgctaatgtttcttcaggattgtcataatttaaatgaatgtttgcaaccgttccttttaataatgcttgttttgttttatcaaaatgtttaacgacatgttgcacttcacctgactcaatataaggtgtgagtgcatgatctgctgctttaaaatagttcttgcagaacggacatgcaaaattgataaacgactcaattgttattggcgcatttttcgaaccaaatgttagatgtttaacttctgtcataattaatccctccactttatctataatactattgaaacatgacacattacatattgcactcatttagtcttagtattttaataaggattaacaatcattgttgtttcttatgatttgaatttgtattcaatcaaaaaactatattattaaattctaaatggtaaaatatagatacacataaatttttaagggggaattcttatgaatgattcagtgaaattactaaaatcactaacggatgtcgatggcattgctggacacgaaatggcagtcaaagcattaatgaacgattatttaacacccgtaagcgatgaaattatcgaagacaatcttggtggtatttttggtaaaaaatcagccactaatggagataaaacattaatggttgcaggtcatctagacgaagttggttttatcgttactaaaattgataacaatggtttcttaaaattcacacccattggcggttggtggaaccaggtcatgctttcgcaaaaggtaacgattacaacagatgaaggtaaaaaaatcagaggtatcatcggttcaaaaccccctcacgtattatcaccagaggaacgtaaaaaaacaattgatatgaaagaaatgtttattgatattggtgttaagagtaaaaaagaggcagaacaatttggcatcgaaatcggtaatatggtgacgccatacagtgaattcgaaacattggctaatcaaaaatacttaactgctaaagcatttgataaccgctatggctgtgcacttgccatagatgtattacaaaatttaaagaatgaagcgatagatatcaacttggtggctggcgcaaatgtacaagaagaagtcggtctgcgtggcgccaaagttgctgccaataaaatcaaacctgatttggcaattgccgttgatgttgccattgcttatgatacgccaggtatgtcaggtcaagtcagtgatacggctattggtaatggaccggttgtgattattatggacgcatccaacattggtcatgttggtttcacaaaacatattaaagacgtggctaaaaaacataatattactgttcaattagataccactgctggtggcggtactgatgccggcagcattcatgtcgctaatgaaggcacaccaaccgtctctatcggggttgcattgcgttacatgcattctaatgtgtccgttttacacacagatgattataaaaattcggtagcgcttgtaactgagattgtaaaatcattaaataatgatgttgtcgatcaaattatctggtaatattcgctaacctagttataaattaaaatccacacagagactgagttaatcagttactgtgtggattttattacatttcacattcgttcataaaaacagctaccaaattatttcgttgtatttttccaactatcatcacttaacatttctcctggccatgtatacgccataacaccaccatctattgtgatagactcacccgttataaatgaactgtcatcagacgcaaggaaggctacaagtttgccaacttcttcaggtgttcctaatctacctaatggtgtaacccatttttgattatctctaaatgctttacccgcttcatcttcagccgtacctgttaatttatctacaagtggtgtttcaatcgtacctggtgaaatagcatttgctctaatattttcacgaccatattcaatcgcagtcgaacgcgtgaaattaatgaccccacctttggctgcattataacctgaacgatttaaatctgcagctaatccagaaaatgatgccgtattgataatcgaaccgccctcatccatcataagcggtagtaaaaacttagtcattaaaaatgtacctcttaaatcaacacctaatatcttatcgaatacttcaactggatattcatgaatacgccccgccgcattatcaacaccagcgttattaaagagcacatctatttttccatgcttttctttaattgcttgagcaaagcgttcaactgcgtgcgcatcggacacatctacgatataacctgaagctgtattgcctgcattattgatttctttgacagtgtcatgcactttttctgaaatatccactgccaatacatgcgcaccttcattcgctaatacttttgctgaggcagcaccaatacctgtacttgcacctgtcaaaatagcgattttgttatttaatcttcccatcattcatcacttctcctatctaaaaaatgtatttccagttctgtaaaaacgtttttttacataattccctttttctagaaaattgaaacttgattacgctttttgatacttttttacatgcatatgtgtaaattttttcttaagcacatatttattttcagaatatttgttcaattaaaaagattattctgatatactttcgataacttaattaggaggtagtacatatgacttcaaatacaaagcataaaccgacactcgtatatagatttttaaatattgtagaaaaagttggtaataaactacctgatccaagtattttatttttcttgatgtgcttaggacttgctattatcacatggattgtttcactatttcacatcaccgtaaaacaccctggtactggagatacaattgctattaagagtattttaagtaaagacggtctaatgatgatattaaatgatgctgtgaagaatttttctgaattcccagctctaggtctcgtattagctgttatgcttggtgtaggtgtcgctgaaaaaacaggttattttgacaaattaatggttcaaattgtacataaagcacctaaaaaatttatcgttccagtcatcatacttattggaatcttaggtaatgcagctggtgatgctgcacctatcgttttacccccgttaactgccatggtatttattaaattgggatatcaccctattgcaggattagcgatggcatacgcatcagccattggtgggttttcagcaaatatcatgatcggtatgtcagatgccttattatatgcatttactgaacctgcgactaaaattgtttctgacaatgttcatgtcaatgtggccatgaattggtattttattgctgcaagtgtacttgttttactccccgccgtttattgggtaactatgcgctttgttattccaagattaggttcatacgacgactcaaattctgatattcaagttgatgatgaaaatactggactgacaacagaagaaaatcgcgctgtattttgggcaaatataagttttttcatcatgattgcgttacttattattttagctatacctcaaggcagttttttaagaaatgctaaaacaggtagcttacttaacgatgcccctattattaatggcgttgggctaattatccttgttttattcttagtacctggtttagtttatggtttaatgatgaaggaatttaaaaactctaaagatttaggtaaaatgttagctgattctatgtcgtcgatgggttcatttatcgtcatcgtattttttgcagcacaactactagcatttttagaatggagtaatttaggcgttatcgttgctgttaagggagccgccttattacaaggtcaaaatggcatcatacttatcttaggcattattttgttaagcgtaatcatcaatttattgattggtagcgcttctgccaaatggggcattttagcacctatttttatacctatgctcatgcttgtaggtttccatcctgctttcacacaaatgctttatcgcatcggagattcaataagtaatccgattacaccgatgatgccctacctaccactgttattatcatatgcacaaaaatatgataataacatgaagttaggctcattattatcgagtctaatgccttatacaattgtgttaagtatcgtatggcctttatttatgattatctggtatttattaggttggccattaggtccaggcggtcctttacaggttaaataaacaattataaccaagcatacaagtagcgatgttactgtatgcttggtttttttcatcattatcattcaaacaattgacttatttgtatttacattggacaatatgaaaatttttaatcacaaattttattttttaatgtaatatataggaaagaacagggtaaacaaaatagagcatatgatagaacctcattttttacataggaggcaaacatggaacgtataggattaattgatatcggttcaaatacaatcaggttagttattttcgaatttgataaaaaaacaggtctaaacgaattattgaacattaaaacaccagcaaggctaagccaatatttaacaaaagatttggcgatgaacaacgaaggtattgaagtattaactaagacattaagcagttttaaaactgtagcagataagtttgaagtaactgaattacatcccattgctacagcggcaattagacaatcaacaaacagagacaaaattattgaaaacatcaaaaaagaactgaatataaaaatcaagttaatacctgaagaagaagaagcattttatggtttttatgccattactcataccacagacatccaagatggtgtttctgtcgacatcggtggcggttctacagaagttacactttttaaagacaaaaagttaatagaagcacacagttttccatttggtgtcgtcactttacagcgtaaattctttgacggtaaagatcataatgataaatcttcaatcaaagatatggagaaatttttatctaaacaatttgatcaactcgcttggttaaaagaccaagaagtcgctttagttgggataggcggttcagctcgtaatgttgcacgcatccatcaatctgaacattcataccctattggcggtgtccataattatacaatgacggacgataatatcgatgaggtatattctatacttaaaaaaagttctcgtgatgaattgaaagacatcgatggtttaagtagagatcgtgtagatattatactgcctgctgtctccgtctttaaagtactgtttaataaaatagaagcttcgcagtttacattttctcgtaaaggtttacgcgaaggctatgccatgaatattattagtgagcgttatccaacagaatttaaaaaagaaaacattagaaaagatgcccttttccacttagctaatgaatatggcatagaggaatcgagcgcaaatcaacgtgttaaattggcacagtctttattaaaacaacttatcaatttagataaaattgaggtatcagatgacgaaaaaacattatttgccgagggtgcttacctgtattacttaggtagatttattgattcagattctagttcaccgcacacatattatattattgctaactctatgattgatggtttcaaacatgaggaccgcgttaaattagcattgcttgcaagttttaaaaataaatcactgttaaaattctttagtcatgagacggaatggctacgtggtaaagaattggataatgttcaatcacttggtggcattataaaatttgttaatgcgctcaacatctctcatacaagtgctgttgagtcgatagatttaaaagaaaaagatggcgagtatacattatacgtttactataatggtgcaccaattgctgaagaatatcagtcacttcgtcaaaaaaaacatattgagaaaattttaaaagaaaacctttctattatctttacaaaatcttaaaattcatatgatacggtatacgtagcaaaatatgtattttagactacaacgaggtgtataaagcgttatgcatagaaatttgagagataaagacttaaatttaccgcaatattataataatagagagcttagttggttagattttaactaccgtgtattacaagaagcacaagataagaacaacccactattagaacaacttaactttatctctatatttagttcgaatttagatgaattctttatggttcgcgtagcgggcttacaagatcaagtcaaaatgggatacgataaacctgaaaacaaagcacaattaacacctaagcaacaactcgttcaaattaagctaaagaacaaggaaattgttgatttacaatacaagcgttataacgaattaattgatgacttaaaacaatatcaagtagaaatcataaaaccagaacaactacctgacgatttattgcctcaacttgaatcagaatttaagtatggcatcttgccaacactaacgcccttagggattgatgcttatcatcctttccctaaattaaataataaaagcttgaatatttttgtagatatcgatacagaagatgatattaattctgctatcgttcaaataccttcacttatttctcgattttattcatttaacaaaggtgataaacaatatatcattttgattgaagatattatcacctacttcattaacgacttattttcaggatatacggtcttgaacacatttacgtttagaatcacacgtaatgctgacttaactattcatgaagatggcgcagaagatttattaatagaaattgagcgcttcttaaaagagcgtaaacgtggtactgctgtacgtttagaagtagatggccgacaagcgacacatgaggatattgtgtggattatcaaccaactagatgtgcacgataatgacgtctattttgtagatgggcctctcgatttaaccatgttgactgatttagttgaccacctatccaataagctgaaatatttgaaatataataaatatgtcccacaaatacctcaatctctaggaaatcacaatatttttgatttatctttaaaaagagatatcttcttccaccacccatatgaatcatttgaacctattgttgattttatacgggaagcagctgaagatccaaatactattgcaataaaacaaacactctatcgtgtaagtaaggattctcctattattaatagtttgaaaaatgcagctgaaaatggcaaacaagtcactgtgcttgtcgaattaaaagcacgttttgatgaggaaaacaacgtacattgggcaagaatgttggaagaagcaggttgtcatgttatttatggtatgacacatttgaaaacacatagtaaaattgcactcgttgttaagcgaatgaataataaattaacttcattcattcatttaggtactggtaactataatgataaaacagcgaatatttataccgatatgggactgattacaacgaatgctgaaattgctgaagatgcgattaatttcttcaattatttaagtggctattcagtaaaacctgaatataacaaattgattgtcgcacctttcgatattcgtgatgtctttttagctagaatagataacgaaatcaaatcacatcgtgaaaatggtaacggtaagattatcatgaaaatgaactcattaacggataaagatatcattcttaaattgtttgaagcatcctgtgcaggagtaaaagttcaattgatcattcgtggtatttgttgtctcaagccaggtgttccaggaatcagtgaaaacattgaagtcgtaagtatcgttggtagattcctagaacattcacgcatctatcatttccataataatggcgacgacatcatatatctttcttccgccgatgcaatgactagaaatatgattaaacgtgtagaaattttattcccagttgaagataaaaatattgcgaaacgtttattagattatatgaacttacaactctcagataaccaaaaaggacgttaccaagatgaattaggtcaatatcattatattgaaaataatttatcacctttaaattctcaagcatttctaatgaaagaagctatggattatggccaacaattaaaagaggataatacacgcccacaagttatgtctgttaacgagcgtaaaggctggtttactaaaatacgtaagcaattcagaaagtaatttgttagtaagatagcttagacaaagcagtcattttaactagtccacaaagagtcaggaacattcaaagttgttcctgactcttttttatttatatttcatcaatcatttttctaacttacaattaaaataagcaatcatgctaatttgtaaaaatattatcgttcactctgtgtaaacccatttttgaatcgagtcaatggttctaactacaataaccaatatcatcatattatatcggcgaatcaggcgatttcatctattttttgctataattaatgtagcgtgaaatttatatttcgtactgttattaaaatgatacggaggtattaatatgaacgatttagcaacacttaaacaagatttccctctcatagatagtatgcaaaattataagcctattttttgggaaaacccaaattttcgtaaaccagcgtcattaacatttactttaaaagatatggaagatgctgcgcaacgacttgaacgatttagtagttacataagcactgtattcccagaaactgaaaataatcatggccttattgaatcacctttaaaacacataccttttatgcaaaatactttgacaaacatagagtccttacccattgaaggtaagctatggctaaaatgtgatagtcacctcgctatatctggatcaattaaggcgcgcggtggtatctatgaagtacttaaattagctgaaacgatagcgatgcaagatggcgatttaaaagagacagctgattatcgtgtactggctgagcaaaaatatcaagatctgtttagtaaatataatgttgccgttggttcaaccggtaatttaggattaagtatcggtattatgagtgcaaaactgggctttaaagtgacggttcatatgtctacagatgcacgtcagtggaagaaagatcttttgaggtcacgtggtgtggaagtcatagaacatcagtcagattatcagtacgctgtagcagaaggaagaaaacatgctgaaaacgatcctacctgtcattttgtggatgacgaaggttcatctgacttgtttttaggatatacagtcgctgcattaagattaaaagcacaattagctgctgaaaatatacaaatagatgctgaacaccctctatttgtctacataccttgtggtgtcggtggtggcccaggaggagtgacattcggtctaaaacaagtctttggagaacatgtttattgtatttttactgaaccaacacatgccccttgtatgctattaggtatgatgacgcaattacacgataaaatttcagttaaggatattggcattgatggaaacacagacgcggatggtttagcagttgcgcgtccatctcgcttagtcgggcaaattatgaatacgttactctatggtatacagaccgtatctgatagcgaaatgtatcgttatctatatcttttaagtgaaaaagaagatatctttattgagccctctgccgcgtcagggtttgctggcattaaatcagcaataacattagccaaacaacagggtatccaaatgaatcaagcaaatcatattgtatgggcaactggtggtaatatggtgcctaaagaagaaatgctaaaatatgttaatcatggtaaatcttgcttatagtattaatcccttgcacttttttaaatgcaagggcatttttataccgcttaaccaaaaacattttcagaatatttattgaattctaaaaataaatgtgttaaagtattctttatcaatttactttagttcggtagagaaacaaagtatatgcaaaggatggttttaatatggatgcagcaacaatcattaataacaaagaaaaagaacttaactttttaaagcattttcaacaagctgactttaacttagtagattttagctttattgaatctctagcttggcaaaca

SEQ ID NO: 16 - DNA, 20817 bp, Staphylococcus saprophyticus
  misc_feature (15033)..(15033): n is a, c, g, or t
cacctatggctgtgttgcaagagggcgcgataagtggtgctattaaaaaaccttttaagacagtttggacagttgaaaagaataatcaacccataggcctatttcgttcgaaagtggggctcaaaccaactatgtattttgaagggactcaaggagatataataaaatttcagtcaggatttttttcgagaagtgtaaaggtgacagagagtaatcaagaaattatgcaaacaaaatcagagcgatttaaatttgcttccaggcacgatgtgtatatagaaacggaaacatatcatccgactatgttaatactattgttccaagtgttttatgaatttcaggaaaaacaacgtaaaaatgcaaactaggttaacaatagcacaataccaggctagaacttgagatatggcaaatgtctcaagttcattttttaaattcaatggaaatctgtggatagttagtgtgtaatatatccattctatttacagatgttaagttgtggtaaaatatgagacacgtattgtatggactgatataaagcatggatgtccataataattgatagatttggtattaaatcatgattttatggaggtggcgtgatgaaagtattcttgaaattaggttggttttttaaacaacaaaaaatgagttatctcataggcttaggcaccttattgttaatcgcattaattgaaattgtaccgcctcaaatcattggtcgtacaattgatgagatgacttctaatagattaacgcctcgattattagccatttatttattcatacttgttattactgcaatattaacttacgttcttagatatgtatggagattatctatatttggaacaagtcaaaaattaggtaagatattaaggacctatctatataaaaaatatacagaaatgagtgctatctttttccaaaatagaagaacaggtgatctgatggcacatgctacgaatgatatcagagctgttcaaaatgctgcaggtgcaggtattttaatgattgcagattcattgataactggtggcacagtcatcatcacgatggcaacaacagtcagttggaaattaacgttgattgccatgattccacttccatttatggtattgcttaccagcatttatggttcgctactaagtaaaggatttaaaaaagcacaagctgcgtttagtaaactaaatgataagacgcaagagagtgtggcaggtatcaaagtaaccaaaacgtttggctatgaaccaagtgatcaggcggattttaagcatttaagtgatgatgttgttgcgaaaaatttgaaagtatcaaaaatagatgcactttttgatccaacgattactttagtcataggtatgagttatttcttatcgatcgcattcggtgcgcagatggtttttcataatgatatcagcttggggcagttaatcacatttaatacatatcttggcatgctggtatggcctttactagcgctaggcctgttttttaatattgtccaaagagctaaagcatcatatgaacgtattgaggaaattggcgaactacctaatgatatcgatacttcatatgtcattgatgaacgtcctcaaggggatataaggtttaatataaatcagttttatttcccgggtaatgaggatcaaggtatttatgatattcattttacaattaaagaaggttctacagttggtattgttggtcgtacaggttcaggtaagagtgcattaattaggttattattacgagaatttgatacacaacacgctcaagatattgaatttggtggacatcccattcgtgattacaatgttgagtcattaagagctcaatttggttatgtgccacaagaacattttttattttcaacaaccatacgtaataatattgcatttagtaatgaaacgattgacgatgagaaaatatttgaagctagcaagcttagtcacattcacgatgatatcatgcaattttctaaagattaccaaaccgtagtaggagaacgtggtgtatcgttatcaggtggtcaaaagcaacgtgtttctattgcacgtgcgctactcgttaatccagaaatactcattttagatgattcattatcagcagtagatgcacaaacagaagaagccatattagaaaatttggaacgtctgagaagcggtaagaccaatattataacggcacatagaatgagtgctgtaaaacacgccgatttaattatagtaatgaatgaaggccgtatcatcgagcgtggtaatcacgcaacactgatgagtaaaaaaggttggtattacgatacttaccaagctcaagcattacaagagcaactgtctcgcaacttggatagtctaacgaaaggggatggtgaaaatgactgaaaatgctaatctaacagcaaaagatcaaggtagcgcactcattaggttatttaaatacaccttaccctataaatggattattgttttggcatttattacgctcatattatcaacgattgctagtatgatgacaccttatatggtgaaaattttcatcgatgattatttgacaccacgccattttcctaaagagacaatggtatggttgattgttatttttattagcatacagttgattggcgctatcaccctttactttagccaatatttatttcaatatttagcatttaaagtaattcaacaattaaggattgatgcatttaataagctgggtaaattaggtatgagatactttgataaagtacctggtggtagcattgtttctcgacttacaaatgatacagaaacgattgttgatatgattgtaggtgttttttccacctttataatggcattctttatgatgatttcaagttacatcatgatgtttgtgttagatgtcaaattagctttaattgcgctcatttttttacctatcataatgataatattagcaagttatagaaagtattctgcttttttattttcaaagtcaagacaacggttatctgatttaaattcgaagttagcggaatctatagaaggcatgaaaattatccaagcctttaatcaagaacgccgattaaataaagaatttaataagattaatgatgaacattatcaatatatgttaaaaactgttaaattagatagtcttttacttcgccctgcaatcagttctatttcaatttttgcggttgtaatgattcttggatactttggagtaatcagctttactactggcatcactgcaggtgtggtgtttgcttttgtacaatatatggaacgtttttttgaacctatcaatcaagtaagtcaaaatttaaatatactgcaacaagcgctggtttcagcaagtagagtgtttgcactcatcgatgatgatacgtatgaaccacaacaagaagcaaacaatgacaatgctattgagaccggtgaaatcgagttcgacaatgtgagctttagttatgacggagaaacagacgtgttaaaaaacattagtttgaccgcgaaaccaggagaaatgattgcgcttgtcggtcatacaggttctggtaaaagttctatcatcaatctcttcatgcgtttctatgaattcaatcgcggtgatattaaaatagacggcaattcaattaaaaagataccaaaaacagaattgaaagaaaaaattggcttggttttacaagatgcctttatgttctatggcacgatagcttcaaatattaaactttatcatccgtcaatgacatttgaacaagtgaaagcagcagcagagtttgttcatgcaaatcattttattgaaaaactgccaaatcaatatcaacataaagtgattgagaaaggtagcgcattttcaagtggtgaaagacagttgattgcttttgcaagaacgattgcaacaaatcctaaaatcctaattttagatgaagccacagcgaatatagattcagaaacagaggaacaaatccaacaatctttgaataaaatgagaaaaggccgtacgacattagcgattgcccaccgattatctacaattcaagatgctgatcaaatatttgtattaaataaaggggaaattgttgaacgtggtacgcatgcacaattgatagcacaaaaaggtatttatcataatatgtatttattacagaatggataaaactgttatcataattaatttaaatataagtataggcataggatgacgagtgtgaaactcgatgtcctatgcctatattaataggtccaatgtttgattaaccgacatacacatcttgatattcatcatgtttttcaataacgcttttagcaaatggacatgtagcagatacttttaaattattgtcacgtgcgtaatcaacaacagctttaactaactgagaaccaataccttggccacccatttcttctggtacaccagtgtggtcaatatcgatttgattatcattttgttggttaaaagtaatttgagcttgtggattattttcgtcatcaccaatgtaaaatttgtttgtaccttgtttaatttcagccataatatcgctccttaatttttgtctatagttattaaatatcacattttagcgactattaaacaatttgtgattgaatgaaatgagaagaaatgtaatagattgagttaaaagcattgaaatattgcaaaaataagtttatagttttaacgaaataatttcgatttggaggggcgttttttgaagaaaagtataataatcatgctgacatgtgtaatgatgattacattaagtgcgtgtggtaacatcaataaaagtgagaaaaaagacgtcagtacaaataataaacttaaaatatatacaatagcttttgcttttcaaagttttacggagcaaattggtggcaaatatgtagatgttgaatcaatttatccgcctggcgcagatatgcattcttttgagccaacacaaaaagaaatggtgaatattgctaagagcgatttatttatttattctaatcaagatatggatcctgtcgctaaaaaaattgcgggctcaatcaataatgagcatctaaaattacctgtagcagcgaatttaaagcaagctgatttattatcaaatcatgaacatgaacatgaccatgagcacgaaggacacgaagcgcatgaagaacacgatgaacatgaagggcatgatcacgaagagggtagcaaagatccacatatttggctagacccagttctaaacaaaaagatggtgaaagcgattaaggatgacttagtgaaaaaagattcacgccataaagcatattatgaaaaacgttataaacaacttattgctgatttggatgatattaatcatgaaatgaaagatattacttcaaatcctaaacgagatacagtagtgatttcgcatgattctattggttatttagccaatcgttatggatttaagcaagaaggtgtcagtggtatgaataatgaagaacctagtcaaagggatttaatggctattgttaagcgcattgatgatacaaaacaaccgtatgtgctttatgaacaaaacatctcttctaaagtaacagatgttattcagaaagaatctaacacaacaccgcttagctttcacaatatggctacactatctaaaaaagaaatgaatgataaagatataacctatcaatcacttatgaaagaaaatattaaatcattggataaagcattaaatcattaattagaaaaaggtgcgcataaccatttatgaactgtcataaataagctatgtgcaccttttttattttgagcacttttccgtcagtatcaatctaatgaacttatattataaaaataatagtcggtattaacaaaagacatggtctaagttagttaatcatatctaatataagaaacagttgtattataatactcttctaagccatgaataccatcagcgccacctaagccagattctctccaaccagcatgaaaataattaacgacttcttcggcttcacaattggcataaacttcaccaaatttaagtttttcagtagctaacataatttcttttaagttttcagaaaagatatatgatgataagcctgcattcgtatcattggcttggttaagcgcatgttcaaattcagaatatgtcacaattggtaaaacaggaccgaatatttcttctttgaacgcactgtcttcgagattgatatgatctaaaatagtaggagcataaaagaaaccagaacgcttaattttatgaccaccagtgattaattgagcaccattttttacagcattttgtactttgtcatctatactgtcaagttgttgttgattaataatggcaccataatctgtagattcatcaaatggatcgccgactgttaattgttccatttgagctttcaatttgtcgataaatgtatcgtgaatatcttggtggacaaaaatacgctcaggacaagtgcaaacttgaccagcattatttattcttgctgtaacaatataattaacggctttatctaagtcagcatttgatgtaacgataactggcgcgttacctccaagctctaagttcacttttttgactgtagaggcactttcagcatagacagacttaccagcgcgcatactaccggttaatgaaatgagttggatatcaggatgttgtgctagttgcgttcctacagtttcgcctgtacctggtaatatttgtactaggccagcaggtatcgttgaggcacgtagtaattctgcgatttttaatgtaattaaagaagttgcttcacttggtttaatgacaacagagcaaccagtaataacagcaggaatcacttttctcatcaagaccataattggcgcattccaaggtacaatgcctgcagttacaccaatcggttttttcgttagtaaaatggtttcattttcacgactattttgtaaaacttctcctttattattcatactcaatccagtcatatagtcaatgaattgaatagctttatcaatttcaccttttgctgaagctaaggttttaccttgctctttaacataaagttcagctaatgtatctttgttttgttctaataatggaatgagcaatttaacatgatcagcgcgtgtaggctctggtgttttttcccattataattgagcttgtttggatttttctacagcatcattgacttcggcttccgttgcaaatgtaatcgtatctattttttctcctgttgcagggttgataacatccattgtgtcagtagatttacttgctataaattcattgtttataaataattgattcaattgtgcacctcacaatatatacataccacttaagtaatgatgaaaaaccgaacgcttgattttcattgaaacgtacattcaatatattattttatatgtcttactgaaagtgcttaaaacggactaatgctaaatttatagtgggtgatatattttttatacttatatgttgacagaaagtgaatagcgcattataattcatctcgaattcgaaataaatttagggagtaggtgaaaaaagtggatcgtacacaaatatctttaaatacatttgttggtttaaatagaaccttagatcatctaatgaaaattgttaaaacagatgtgcaacgttatggattaaatgtaacagaatttgctgtaatggagttgctttacaataaaggtgaccaacccattcaacgcatcggtaatcgtgtattaatagcaagtagtagcattacgtatgtcgtagataaattagaagaaaaaggctgtgtagttagacaacgcaatgagaaagataagcgtgtgacgaatgcatctttaaccgataagggacgtagtatgatggatgaaatattcccagatcatgcatcaacattagaatctactttttcagtactaacagatgaagaaataacggtattacaaacaactttaaaaaaattaagtgctcaaccgattgaataaaagggcacttaaaatttttatcaaaaattacttcgaaatcgagataattataagggataggcgtttattatgacaaataaccaattattaggtattcatcatgtcacagcaatgacagatgatgcggaaagaaactatcaatttttcacagaagtattaggtatgagactcgttaagaaaacagtaaatcaagatgatatttatacgtatcatacattttttgcggatgacgaaggctcacctggaacggatatgacattctttgattttcctaatattcctaaagggtcagcaggtacaaattcaattacacgtccttcatttagagtgcctaacgatgaagcgttggaatattatgagcaacgatttgacgaatttaatattaaacatgagggtatacaatcactccttggtacaaaggtattaccgtttgaagaggtagatggtcaaagttaccaactggtgtctgatgagcataataaaggtgtggcaccaggtaaaccatggaaaaatggtccagtaccaatggataaagcaatctatggtctaggtcctatcgaaattaccgtgagttattttgaggattttatgaaaatacttgaagatgtatttggcatgacagtcttaactaaagaagacggagtagccattttagaagtcggtgaagggggtaatggggggcaagttatcttaaggaaagatacagatggacctgaagcaagacaaggttatggtgaggtgcatcatgtatcatttagactaaaagatcatgcagcaatcgtacaatggttagaaaaatatcaaacattaggtatcggtaattctggtttagtagatcgattttattttgaagcgttatatgcacgaataggacatatattaattgaagtttctacagatggacctggatttatgggtgatgagccttatgaaacattgggtgaaagtctagctttaccaccatttctagaaccacaaagagcctatattgaatcagaaatacgtccgtttgatacaagcagataaaaggacttttggttagagtaaaccaccatagcataagatataaagggaaatttaaattcaaatatttaaggaggtaattttatggaagcaattcaacatattcatcatatttcagcaattgtaggtaatccagaagaaaatattcgattttacagagatgtattaaatctaaagttaattaaaaaaacggttaattatgatgatccatccacttatcatctttacttctcaaatggaaatattgaaaatggtacgattttaacgtttttcaattggccaaatgcacataaaggtcgtaaaggaaatgggcaagtcgaacgcattgcttttagaatacctaaaaactcaagggatatttggaaagcacatttacaagcacatcaaattgaagtagtagaaactagattgtttgatcgtgaaacattagaatttaacgatacacatgacttacctttagcattagttgaagcagatgacgataacgaccaaactgacgcacagagtatcattggatttcatggggtgactttattatctagtcatcctaaggcaacgttgaatacactagtaaacgatatgggtcttcataaagtgaacgaagatgacaatgtggtacatgttgaaacaaaaggccattggcaacatcatgtgattatcaaaaaagaaagcgctcaaatgaatgttcgttggggtgttggtgttgttcatcacattgcttggtcagttccaactgataaagtacaacgagaatggttagttaaaatgactggtaaaggttatcatgtgactgacgttaaagatcgcaactatttcaaagctatttatatgaaagagcagggtggcattatctttgaatttgcgacagaaggccctggttttacagtggatgaacgatttgaaacattaggtacgcatttagtattaccacctcaatttgaagacagaagagaaacgatacttcaattgctaccacctattcgtatatagaaaatagatataagaggaggcacacttgatatggaacatatttttagagaaggtgaagcaaatgcacctacattgattttactacacgggacaggtggagatgaaagtgatttattaccattaagtcagctacttaaccctaagtataatgtgttaagtataagaggtgaagtatctgagaatggaatgaaccgtttcttcaaacgtcacggtgaaggacaatacgatatagaggatttaaactttcgaacagatagactcattgcatttttaaaagaagctgctgaacgctatggttttgatttatcgctagcaattcctgtaggtttttcaaacggttctaatattgcaatcagcatgattttacatcaggacatttcatttcaaacagcactgttatatgcaccactttatccggtgaatgatgcgaatgataaagatttaagtggtatgcatgtattactttcaatgggtgaacatgacccaattgttacaagcaaagatagtcaaaatgtcattgatttattcgaaaaccgtggtgcaaatgtcacgcaagtttgggtgaatagtcacgaactgactcaagcaggtgtggtagcgggtcgagacttattaaacaatatttttaaataatttcccaatataagtcaccatttgttatacatgatacaaagtgtagatggcttgtggcgatttcaattttagaaaatgaagtcaatctagactataatatatggataatagaaaaggtggcgatcataatgaatcatcaagcgttgatagtgatggatatgcaaaatggtattgtaaatggtttgcagcaaaaagaaaatgtaatagctaataatcaaaaagcaattgaacacgcgcgtcgtaatagtgtggcagtcatttttgtacgtgttgcgtttacaggtgaatatatggaagtttcaccaaataataaaatgttttcgcaaatgaaagcaaaaggcgtgcctatgaataaacaagatgaatcaactcaaattgttgaagcattgaatcgccaagcaaaggaaccccttgtaacgaagcatcgattaagtgcgtttactggtagtaatttagaggtgttattacgcggtttgcaagttgatcatcttgtacttacaggtgtgagtacgagcggtgtcgtattatctacagcagttgaagcggcagacaaagattataagctaacgctattatcagatgcaatggccgatcaagatgtagaaaaacatcaatttttaatcaataaaatattaacgcgttatgcagatgtgacaacagtagaagcatggtgtaacagttaaaataaaaataaaggccctatgtatatttcaaacatttacatgactatagcattaatcatgtcgttgaaatcataacatagggctttatagttacataaggccgatgagtttcatccataaagagccgatacctaaccatacaataaagtaaaatatcgcaagtacggcattcatcgtccaccatcgattttgagaaacatagcctgctgaatataaaataggtgcaggaccactactataatgtgtagtagatgccattaaattaccgaagaaacctaacattaacgcactgaaaagtggtggtgcaccagtagcgatagcgacgcctaataatgctgagtacatagcacttacatgcgcggttgaactagcaaataaataatgagaatagaagtagaataagattaatagtactaacacgattggccaactaagacctcctaaactacctgagatagacttacttagccaaggaataaagcccagttcattaagttggttagccatcattactaatattgagaaccatactaatgtattccaagcaccagtttctttgagtacgtcactccaagtaaggacaccggtaatgagtaataaggatagtgcgataaaagcggttaatgtcgcattgatatttaacgtactacctaatacccaaagtgcaagtgcaacgagaaagatgctaaccataaatttttcactggtcgccattttacccatatctttaagctcgttttgagcccaagatttcgcattagcagtttctttaatttctggaggatacattttataaattattaatggcacaaggattaacgatatgatgccagggatgagtgctgcaataaaccattgcatccaggtaatatctacgccttgatgtttcgctaaagattgagccaaagggttgcctgccatggcagtaagaaacatggcagctgtaataaggttgccgtggaattctgtaaagataaggaatccacccattttacgttgggtaccatcttcaggttttgatccaaatgaacgggaaagtgcattaatgattggaaacataataccaccagcacgtgctgtattacttggtgtggcaggtgctaagattaaatctacaccaatcaatgaatagcccaagcctaaagttttcttaccgaataatttaacaaattgtaaggcgatgcgtcggcctagacctgtttttacaaatcctcttgaaataaaaaatgccattgctataagccaaatactactatttccaaatccagaaactgcagtgtctatcttaacggtttgcgttaataccgcgagtgtaaaaccaatcattgcaacggcgcctattggaagaggttgtgtaatacaaccaataattgttgctacaaaaattgcaaacatatgccatgcgccaacatctaagccttctggtctaattggggtaagtagccagataatgataccaatcaatatgggaaagataaattttctgtagtggatgtcactattcatattatgatgcacctttcttgtccttttatttgataaaaaactaaatatagtacaagtatatgatattaaaatcgtatttaagcaaactagcgtagaataggcaactagagcgcttaccacactaaatttaacatcatatcctattaatttattataagatttttcataataattatagttctgtcaaaaccttatgtaaagctagcttttagaaaaataatggcaacatcattaacttatagcgtataagttaatgatgttgccatttacagagatattttattgtaataagcaatagtttagcatttttaaatgggcgttatttacgtgaaataccttttatcaaaattggaaataataatataaaaccaaagatccccataacaggaaatacttttcctattaaatcaataaacccaatgaaggtcgtagcaaaggtaaggactgccatacaaataatcataatataataatgtttgctataaggtcttgtaaatctagaagcaaatgcatacataagacccacgacagtattataaataactaatatcataacgatagacataaataaaccaatcataggagaaatttcttttgctaataatagtgatggcagtgcgacatcttttatgtgagagaattgcgataccatgcctaagtttaacataagcaataggaaagtaatgattaagccacctatcatgcctccgtaaacagaggaagatttaaattttaaacgacctcccattacagataaaaagctgaacgctgctgcaatttgtaagctcccatagttaattgcatcgaaccaccaccattgatcagaacgagtcccggtattcgcgtattgattgggatcactaaagctgagtgaaccggtcattaaataatacatagcaataatagtaacgataataactaaaaaaggtgtgaccatacctagaattgcgatgaggcgttcaaattttaagaataatgttattaaaataattgaaattaaaagtacagaactcaatgcatatggtatattaaaactttcatgaatcgttgaaaccccacctgccgtcataatcatagcgagtgcaagtagaaataaagttaagatgatatcaaataaagtggcaatacgcttgggtaaataatactttataggtccagtgtgattatgtgcatttaatttatagccagtttggagtacaaaaatgccacctagagtgacaatacaacccgttataatcacgccccagatactgtaattgccattactggtaaagaattggaatatttcttgacctgtagcaaatccagcgcctacaaccacaccaacaaaagcaaatgccacaataataatttcttttaaacttgtcatagtcatataaatcctttcaatggtgtagataatataaatgtcattcatatatatatactcacaatttattattttagcttaaaataaaataaattgaaaagaaaaagtatttttgataagaacaattgtatttttagagagaacttaaaagtgcgcacataaacgtatttagattaatggtttatcaaagtgggtaaatgatgaaggttctttggatgcgttaaatttaaaaatttgatagtatgtttatttattatgtgataaatgtttaaagtgatttggaagataacgaaatttaatctgtataagagagagggaacaaagtgactttattaaacttaccactaacattactcattgttatctttttagcgttgggtatttttagccaatggttcgccgataaaataaaatggccatccatcgttgttatggctattgtagggttgcttgtgggccctatttttggattgattaaccctcaagaaagtctgggtcaagaggtgtttagcccactcgtttcgttggcagttgcaatcatcttgtttgaaggtagcagtaacttagattttcgtgagttaaaaggtatctctaaagcagttataagaatcattactgtgggggcagtgattgcttggattttaggatccatggctttacattttgtattaggtttctcagtaacgatatcacttgtattaggtggtttatttttaattacgggtcctaccgtgattcagccattattaaaacaagcaaaagttaggaaaagtgtagattccatcttaaggtgggaaagtattattcttgatcctattggaccaatgttagcgttaggtgcattttatgtttttcaaatcgtagagcaaggttttgagattcaaattattntaagttttgctttacgttttgttattgccattgttataggttttggtgcttcttatttatttatgatgctcattaaaagagatctcattccacaaaatttaatgccacccatccaattggtttttattttacttatttttgcaatatgtgatgaaatattgcatgaatcagggctacttgcggtaaccatatttgggttaatgatggcacgtatgaagcgtcatgatttgatctttaaagaatcagatcattttattgaaaatgcatcttctattatggtttctaccgtctttatattaattacgtcttcgttaactttaaatgtgttagaaagtattatatcgtggaaactatttatattctgtgcagtcatgattatattagccagacctatttctatattgttatctacgatgaatactgagatttctaaacgggaaagagctatggtttcaatgatggcaccacgaggtattgtcgtacttactgttgcacagttctttggaggcttatttgtagaaaaaggaacacccatggcagaatacatcacgcctgttacatttggattagtatttataactgtggtcatttatggctttagttttctaccgttaagcaaaatgatgcacctttcaagtacggaaccaccgggcgtcattattgttggagaaagtgaattttcatttcatttaggtgcgaaattgagggaacatcacattccagttatgacttttaatttatttaataacacatcaaaaagagcacaggaattagattttgaagtatttgaaggcaatttattatctagtaatgatcgtatatatgcagatatgacacgttacaataaatgcttattaatgactcaatcttttgtgttcaatagtttggcgtttaatgaattagtgcctgagtttggtttgaaaaatgtcaacatgatgccagtttcttttagtgatgaacatgcgcgaagtaacttagatggaccaattagaaatcacatactatttgattctgattttacgtcgcattggtttaatcgctatatcgtcgaacataatattttagaaatgccagtttcgagtaaggataatttaacggcttatgacatggtcctctatcatattgatgataataacgaagtcacatttaaacgtgataatcaaaatattacaaattcagaagaaggtgtgattggctatttaaaagatgcttatttacattcgaatatataaaaaatccccgtccatacagattgaaaatcatgtgtgaacggggttttttatgaatactgattagttaacataacgatcatgcataagttcttttaaaatatcgattttttcttgaatatcttgtccggtgtttgtatgtcttattttttgtcgttgtaattccttatcgacgacacgacgtatagaaagttcatcagcgccattcagtaaaacatgttttttggaattaaaatgttggtgtgcgactagttgcataccaaatgaattataaagtaatgtataacctgcgatacctgttgttgactgataagctttcgaaaagcctccatcaatcacaatcatttttccttcagctttaattggatcttcaccatctatttctttgacaggtgtatgcccattgataatgtgcccttgttcagggtctaagccaaaatctttgagcatttttttacacatattaacatcctcacgcaaatggtagtaagggtttttagtttctttatgcgctgttttgtctttaataaagtaacgctcgaaagtcgtcatagcgcgtttgccaaatagtgaagagtatttaccagtccaaagataccatactaaatctgtggctaaatcgtcttgaatatctttgtgatcaaaagcttctctgacgtaatcttcaaaatggtctaataaatctctgccatagcatttcacatcgttgataaccattgattccatttcaccattttcatctactggaatacagccgtgaatcaataaattaccgttataaggtaggtaaagcgtgcctttttgcataaggaaggtcatatgtcgtttcaatttttctgattgttggacagataataatagtttatccatcacttctgactcttcgtctgtgagtttgtttggaccatttgggtcaatcgtttggaaacaagtattttctaatggatatgtttttccatagagtgttgcttcatttttttcataattaatactttctaataccaatcgttcttccatttcaaaagtagggcgacgtttaatgattggtgcctctaatttaaattgtatgatggcgatggcttgatgaatttttgtgatttgttcaagttctaattcagttaagccttcagcatttttaggtctgaatgctttgttttttccatcataatgtttttctgcaagggttaataagggtcttaaattgataccataagcatcctcgataatgtctaagttatcataacgtgcacaaatgcgaagtaggtttgcaaggcaaactttggaacctgcataggcaccaatccaaaggacatcatgatttccccattgaatatctactgaaggataatcaatcagtgtttccataattttatcaggttctggtcctctgtcgtagatatcgccaacaacatgaaggtgatccactacaaggtgctgaactgtgaaagataagccaatgatcaaatcatctgattgttctagctctatgatttgattaattaatgtttcataataagaatgtttattattatatttattacttttatataacagttcttctataataaagacgtaattttttggtaaagatttgcgtaactttgtgcgcgtgtatttggatgaagcataggtgattagttttatcagacgattaatcgttgtaatgtaccactcattgagctcggattttgagctaaagctgtttttaattattttaagtttttcttcaggatagtatacaagcgcagaaaattcattaatttctttgcgtgtcaaagtatcttggaagatatcattaatttttgaacgaacgttgcctgaaccattacgcaatacgtgttgaaaggcatgaaattcaccgtgtaaatcacttacaaaatgttcagtacctttagggagttccaaaatagactctaaattaataatttctgttgcaagttcttctttagtattaaattgttgtgaaagtaaatctaaatatctatcttttaggctcttatctgctgatttctgcatggttatgtcactccagttgtaaaaatatcgtaattatgaaatgcattttataaaacgcttccaatttatgtttcttattgtagcattaattggcacgcctttgtctatttcttattatattatgaagttaaattaaattctaaaaaatggattgagtgtatattactaactgaaaaatttaaggtttattagtaagcgcatatgttagaaaagtagaaaaaggaaatgatgttactcaaatataataaagtggagatttatataaaagttgtgggaaacatacattttcatgaatgttatttattgtataattaacattgtttagtaattttaccattataattttggagcttgaaaatactgttaaatcaatgattaatcgctataaagctgtattttattggttttatttgaaaaaaattattgatttactgtttaatttataatttatttttgtataatatatgcatgtaacaaaattataagggggcgttttgtttcatgtttacattggggacatcattatcgagtcaagtcgatccaaactggcaaacatatatcatgcttgtcgtttattttgtggtgttgctagtgattgggtactatggctttaaacaatctaccggtaacgtcagtgaatatatgctgggcggtagaaacattggtccatatgtaactgcattatctgcaggcgcatctgacatgagtggttggatgattatgggattacctggtgaagtatatactaccggtttatcagcagcctggttagcgattggattaacacttggcgcatacataaactatattgttgttgcacctcgacttcgtgtatatacagaaaaagccggagatgcaattacactacctgatttctttaaaaatagattagatgataaatctaattcgattaaaattatttcaggtgccattatcgttgtatttttcacactttatacgcattctggaatggtatcaggcggtgtattattcgaaagtgcgtttggcgttaactatcacattggtatgttacttgtcgctgtgattgtcattgcttatacatttttcggaggttatttagcagtatcattaacagactttttccaaggtgtagtgatgattattgctatggttatggtaccaatagttgctatgttgcaattaagcggacttgatacttttacgcaaacagcagaattaaaaccgacaaacttagacttgtttaaaggaacgacagttataggtattatttcattctttgcgtggggattaggttactttggtcaaccacatattattgtacgttttatgtcaattaaatctgtcaaacaattaccaacggcaagacgttttggtatcggttggatggcaatcagcttattaggcgcagtgggtgtcggattgacaggtattgcgtttattaatcaaagtggtacagatatagaaaatcctgaaacactattcattttaatgggacaaattttattccatccgttagttggtggattcttgcttgctgctattttagctgcgattatgagtacaatttcttcacaattgttagtaacgtcaagttcattaacagaagacttttataaattaattcgtggtgaggaagctgcaaaggaacatgaaaaagaatttgttttagtaggtcgattatcagtcatcatcgtagcgattgtttcgatttggattgcttggtcacctaacgataccattttgggtctagtaggtaatgcatgggctggtttcggtgccgcattcggaccacttgtactcttatccttatattggaaggggttaagtagaacaggtgctgtaagtggtatgttatcaggtgccattgtagtcatcatatggattgcatttgttaagccattaggtgatgtgaatgatttctttaatttatatgaaattatacctggatttttaactagtttaatcgttacggttgtagtaagtaaattcacgaagaaaccacaaattgatgttgaagcagatttaacagatgttcgccgtctggttaaaactggtgaagattaaaaagaatcataatttaaaaggggtttaaattatgatttaatgtagaaaatgataattggctatgtctgttatcaaaagggagaaatttttaaatagagaaaaggctaacttcaagggggagttagtctttttatattatgataaaacagggtctgacacttattgatgtcagaccctgtttgtttggaattgaatctatttattgagcgcgattctttttgaataatctatatacaatgaaaattactgcaagaatgatgatgacatacataatatatgaatatgtatggagaccattcattagcatatcccaactgccgctcaacattttacccaggtagatcagtgcaaaattccatatcgtagtcccgattaaagacaagatcgcgaatagcatcacgttcatgcgattaatacccgctggaatcgtaatcagtacacgtaagacaggtataaagcgacaaataaaaacagcaattgcgccgatattttt

SEQ ID NO: 17 - DNA, 18999 bp, Staphylococcus saprophyticus
  misc_feature (584)..(584): n is a, c, g, or t
cgcaatatcatccatatctgcgtaagattcttctaatgttttacctgtatctaatgtttcaagtctcgctaattcttcacgatgtgtcacaattaaatcggcaatagcacgtacttttttgcctctattttcacttgtttctaatgaccattcacctttttcaaaagcacgacgtgcagctaatatcgcacgttcactatcctcagcagtaccttctgctacttcaaatatgacttcttggttaaatggattaataatttttcttgttgcttgattcgagctatctacccactcaccatcaatgtattgacgacgagacaattgatttacaagttccattaaaattacctccgttaagtttgttaaatttttatttaacgaattttatagattttatgttagcatagtaaacgaaagcgtgtcaaaccagttcaaatttcaattggctcataacttcagaaacaaagcgctacttaaattctgttcgttaacctgctataatttgaattcacaataaaatatttggtcggaggtgtactacatggcacattcaaacaaccctgaacatcaattagacgaagcanaagatattgttatcaatgcgattggtgaaacaatggatttatatggtatcaacagaagtgttggtaatttatttggtactatgctcttcgaagatagcatgacactcgatgagatgcgtgaacaattacaaatgagtaaaccaagcatgagtgctggggtcaaaagactccaagaatttgatatcgttaagcaacaatttacacgcggtagtagaaaacaacattttattgcagaaaaagatttctttaacttctttagcaatttctttacacgcaaatggcgtcgggaaatcgtaattaatgccgaagctgtccatgatgccgttgcgatactaaacaaaattattaatgacgaaagtacagatgccgctattaaaactgaggcaaacgaaacgaaacagcaactcatcgacacgttaccttattacgaatggttagatcatttaagtgatgcattggaaagtggagaaatatttaaatacttcccaatacctgaaaataattacaaagaagattaaatatgtgtaagatagttagcccaaaatcaacagaatttcaaaaagcgtccgtgtgaagttaaatttcaaacggacgcttttttatttaacaaataagcatgacaattcaaccttaagttaaagcataaaaaagctgagacatcgtacttatctcagcttttatttaaaattacaaattattgtcttctttttgttctctaacttgtgtgatacgcaatgaacgtcgctcgacctctctatacttgtctgcccgactttctagtttaagtcggtcctcattaagtgtccgcataaatgcgaccatcatcataacaaagactacaagtactggcacactcgccaataaggctgctgttttcagtacttctaacgctctctcgccaccgactaacataagcgcaaatggtaataaacataacgcaaacgcccaataaagacggtttgcttttaatggttcaccaattacttttttctgagatgctgctgctaagatatatgatccagaatcaaatgttgtcgctaagaacagcactgccgaaagcataaataatacaatgataatattatggaacggtaattgatgcaatacctctatgattgtagcttccgtaccatgtgtattcagattttgaatcacatcaaattgtccactaatttgtaaaaacacagcatagttaccaaaaataccgaagaacaacatacatcctaatgtaccatagataattgtacctaaaactacttcttttaacgtacgacctttggaaatacgtgcgataaacaatccaataaatggtgcataaacaatccaccatgaccaatagaatattgtccactgttgtgggaagttcgtttctttacggccaccaataccgccaaatggttctagccaagtagccatttcgaaaaagttcttaatcatattacccatacttgtaattgtcgtttccataataaatatcgttggtccaacaattaacacaaatccaagtaatacaaatgacaaaataacgttccaatcacttaatacttttataccttttttcaatccagaatatgaactataagcaaagatagcagttactaaaaacagtatcgcaccacgcattaacatgttatcaccatcgataccagtcaagcgctctatccccgctgtaatcattggtacaccaagtgctaatgatgtagctgcaccacctaataatccaaaaatgaatataatatcgacaatcttacctacaagaccatctgtttgcccttttaatattggacgtaacgtttggcttactttataaataggtttcttcttcacgaataataagtaaccaatacacagcgctggtagtacaaaggtcgcccatgcaatcggtccccaatggaacataccatacatcgttgcataattaagcgcactatctgtcatacctttaccaccatgtggcggatcttgataatagaatgcccactcgataataccccaatatagaatatcagacgcaataccggcacaaaacagcatggcagcccaactaaaattattaaactcgggcttatctgtcgctttacctaaagttacattaccgtacttaccaaagcctatgtataaaacaaatattaaaatagcgagtccgataaacaaataaactgaacctaatgcactagaaacggcatcgttcattttagtaatcacttcttgacttgctttaggaaagaccatcataggaattactgcaatcagtaaaataaccgatgatcctataaaggtcgtccaatccataactttatttttcttcattattgaacacccccgtatttatttttataactatgtaaaagtcgctaaaaatagataaacattagcaaaaaatatatattaattcacaaacatgagcctaacgaactttaaataataatgcaaattgcattcaatattctgaaattaattatatgaatatttatataaaacagagaattaatttaggagtataaatcgctataatcacagtgttaagtttaaacttaatgaaattaatgaatcttacaaactttataatatgtatctttattcattatttacgtataaatatttgtttttatttttttgtattttcagagaaaaagactgtttttttataaaatatcgcataaaggttgttcgatacataattaaatgtatgtcgttttttgtgtgtttttaaatagtcatcacaaacttttatacttaaatattctataatagtgtaaacagcaaaataattgtaataagcggagtgaatttaaatggaaaaatcaaagatcattaattattgggataaacgtgctgaatcctttagtaaaaataagctagcagaattagaaagtacgcatgctcaaaaatgggtagaagaaattaataacataaacccgatacaacgtggtatgaaaatcttagatattggtactggcgcgggttttttagctattttatgtggaaacctaggtagcgatgtcacagggatagatctttctcctgaaatgatccaatcagcaaaacagaatgccgaaagtcatcatcaagatattcactttcaagtaatggatgctgaatcactacaattcaatgatgaaacttttgatatggttatttctcgcaatgtaacgtggctacttcctaatacaaaggcagcatatcaagaatggttacgtgtattaaaacctaacggtaaactgattaatattgatgccaattatggtaacgattcattcattgactataaatccctgaatactgaacatgcacaccacacactcggcaaagatatgctggctgaaagcgaggcaatcaaacaaaatatacccattaatcaccaacccagacctcaaacagatatggatatcttaaaatcattaggatttgatcatatccatttagacactgaaatttatttacgtatgtactcagaacaagatgaattttataacccaacgcccatatttttaatttcagttactaaatcatattagctacagaaaaagtttttattaaagacacaatttccattatattttgccgtaaaaagagcctacagcttgcgttattttttaatttttatcatactataagagaatatagtaaaaggagtggtaagaatgaatcaagaacaatttgacaaagtaaaaaatggaaaaggcttcattgctgcattagaccaaagtggtggtagtacacctaaagcgttacgtgactacggcgttacagaagatcaatatgacagtgaagacgaaatgttcaaactcgttcatgacatgcgtacacgtatcgtgtcgtcaccatcatttagttcagataaaattgtaggtgcgattctgttcgaacaaacaatggaccgcgaagtagaaggcaaacatacagcggactatctagctgataaaggtgttgtacctttcttaaaaatagataaaggtttagatgaacaaaaagatggcgttcaattaatgaaacctatgcctgagctagatgacttactaaatcgtgcaaataaacataaaattttcggtactaaaatgcgttctaatatcttagaactaaataaagacggtattgatttagttgttaaacaacagtttgatgtagctaaacaaattattgcagctggtttagttccaattattgaacctgaagttaatattaatgctgaaaacaaagaagagattgaagcatacttaactgattcaattttagaagaactaaacaaactcaacgatgatcaacttgtaatgcttaaagtaactatccctacaaaagcaaatcaatatcaatcattaatcaaccatccaaacgttgtacgtgtcgttgcgttatctggtggctatagcagagaacatgcaaatgaagtacttaaacaaaataaagatttaatcgctagcttctctcgtgcattaatcaatgatttaaatgtgaaccaatctgatgaagaattcgacaaaattttaggcgaaacagttgaatctatctatgatgcttctgtaaacaaaaattaatctatcctaatacatttaaatacaattacaacactgtcagtgcgtttcgatacgcactggcagtttttattttatgattgtgaaaaaaatcccaatatagtctagccaacttcactatctatctatatactaatattaatttatgaaataatttaattaaaaaataaggagattacttaatgaaaaatcatttgcataggtgggttattgaagcattaagttttatggctttgggtttgtttggctctttaattattggacttatcttagaaactattggcaatcaaacactcattccacaaatagatttatcgtttttatcagaaattggtaaggtcgcaatgtcagttaccggtgctgctattggggtagcaattgcttatggattaggcgctaaacctctagttattttttcgtgtgttatcgttggcacactaggttatacgacgtttggaggcggtgcagttggtgcctatattgctacactcatcgtcgtagaattaagtagattttatgcaagcaagactaaaatcgatatcattgttacgcccttactcacgattgttatcgggggcgctatcgcaaaactttttggacctgcgttaaatgagtttatgactgggttaggtaaagttatcattgtcgcaactgaacaacaaccgttgataatgggaattttagtatctgtcctctttggtttagcacttactgcgccaatttcaagtgcagcacttgcactcatgcttgatttaagtggtttagctgctggtgcagcaacgataggctgtgcggcgcaaatggtaggctttgctgtaaatggctataaggataatggttggagtggtattttatctattggtattggtacaagtatgctacaagtcccaaatatcattaaacatcccatgatcttagtacctccaacaatagcaagtgcagttgttgctccagttatgacaactctatttcctatgacaaataatgccgctggtgcaggtatgggtacaagtggtttaattggccaaattatgacgattaataccatggggggttcacttcaaacctggctattaattataatcttccatattatattgcctgcagtcattagctttgctttatataagtatttctttaaaaaacagtggattatgccaggcgatcaacttatccatgtcgctaactagttcaataacataactattttcattaaaaacagccgtgccagttaaattaaactgacacggctgttttatataaagtgttactgataatctgattgcttgtctccttgtattgatacataggcatcttctgttgtctttcttttttgagttaaataaagtacacctgcaatcaaataccaaactaatacaattaaccactctgatggccaagctaacgatgacggcatacccggtaaataaatcacgataaacaatatgctcaaaataaccgcaatgataccaacaatttgtccgtttttaatacggtaaggacgttctaaattaggatgcgttttgcgtaacttaagaaacgaaattgcaacgagtaaataacctagaacaacaccaataccgcctgcattaacaatccacgaaagtgctggtcttcctaacagcggtgctacaaaagcgagtacacctagaaataaaataccatgcgtaggcgttttaaatttcgggtggatataggcaaaccattgtggaatcattttatttttagccattgcatacaatattctacttccaccaataataaatgcattccaactggttataattccggcgacaccaccgagtacaagtaacacaccaaatccactatgaccgaacagattaaccattgcatccgccgttgctaaactactcgtgttcagtgctgaaggtgaaagtcctgtggctaccccaaatacaatcaataaataaaatataacagaagcaatgattgataatattaaaatgccaccaatctttttagaaggtgctttcacctcttcagcaatttgtggaatgacatcaaatcctacaaataaaaatggaatcatcatcaatacggacatggttccgccaacaccattctcgaatggttttaaattactaaagttgccattgaatccagcaccaaatacaagcaacaagcccactgctacaataaagatagtgaacacagtctgcatgatggctgctggttttacgccgaaataattcagtgatgttaatacaatactaccaattgaaccaattaatactcatgttaaatagacatctcaaccagcgatattccacataaaaccatgatgtttaaaaggaatgacgtaatcgatgactgtgggcaaagcaaccgcttcaaatgtaattacggatacatatccaaaaagtacggaccaaccagaaatgaatgcaataccaggagaaaaagcctttttaacaaatacaaatcctccgccagtttccggaatagctgatgcaagctctgcgtatgtaaggcctataacaataactaataatccaccaattaaaaaagcgacaatacttccgataaatccagctgctgatacccattctcctgacaagactacccatccccatccaagcatggcaccaatagctagaaataaaacatcaactatattcattgatttattaaattgtgatttcattgaacataccccataacattttcaataacgtcaattaaagttgagaagcgcgcagcgtagcgttgtatttatttcactttaataaacgccgccctatcatatgtgattaaccaatcgctttctcaatctttaattgactgattttatattttatttaagatttggtttatcctaatgcatttttattcttgtatagaaagatacttcgtttctaaataaggttctatgccttctacgccaccttctctaccataaccactttctttcaaaccaccaaatggtgcatgtgcagcagatggtccaccatcgttccaaccaatcacaccatattccagttcattaaagagttttaatccagttcgataatcattcgtgaagaaatatgaagctaagccaaattctgtgtcatttgctatgttaatcacttcatctaaatcactatatgtcatcactggcgcaactggtccaaacgtttcttcatgcattgctttcatatctaaatttgcattcgtaatgactaccggttttaagaaattaccgcccaatgcttgaatatcttcaatactacgtgatagttgcccacctttttcttgcgcatctttgatgtgtgttaacactttttctacagcttgattgtcaatgagtggtccaattttaacttcttctttcaagccatcacctacagataatgcatgcactttttctattaatttttcgttatatgcctcggcgatatcttcgtgaacatagattctgtttgcacatatacaagtttgtcctgcatttctaaacttcgaagcaatcgtaccgtctactgccgcttcaatgtctgcatcattatgaacgataagcggtgctaagccacctagctccatcgtcacatttttaacttgttgcgcagatgattcaattaatgatttaccaacagcagtcgatccagtgaatgtcactttactaatcaaactatgatttgtgaaaatgtcccctgcgtctttacctgaagcaataatgtaggagatagcatcttttggaaaacccgcttgatgtgcaagttccacaagtttaatcgttgtcagtggcgttttaactgctggtttacaaatgattgtacatcctgccgccaatgctggtgccatcttacgcgtaatcattgctgctgggaagttccacggtgtaatcgcgcctacgacacctactggaaatttatctataacaatttttttcgaaggtgaattagctggtatcgtacgaccatatacacgttttgcttcttcggcataccatttgacgtatgagttcgcataagctacttcaccttttgcctctgccagtggcttacctccttctaatgtaatcagacgtgcaagttcgtcttgatgatcatcaattaattgagcccattgcgctaatttcgctgaacgttcgtgcgcatcgaccttcttccagttttgaaatgcttgatgtgcttgtttaatttgatgattaatttgttcatgcgtagcataatctaaacgctctaaaacttcattagtagctggattaattacttctaactttgtcatggtaacgacccctttttaaatataattataaaatccctttcatttatccataccctttccgcttataaaatataaatgctacttattcattaattcgtttgcttttcaatggccttttcaaatacttctgttaatatatttagacctttgtttaattcttgatctgtaataactaatggtggtaagaaacgaatcacattgcctttaataccagccgataataataataagcctttttcgtttgcagttttaataatcttagctgttaacgctttgtcaggttcaccagtttccggatcaacgacttcaaatgcaaccatagcccctaaacgacgaatagctttaacttgctcataatcttgactcaatgctgttaaatatgcttctagttgatgaccgagttgttccgcttttccatttaaatcttcattttctatgatttcaatcactttaagtgcagcttcacatgctaatggatttccagcatacgtaccgcccaattctcctggtgatgcgctatcaacgatttcttttctaccaacgacaccacttaaagggaatccagcagccaatgatttagaaaccgtaattaaatctggttcaacatcaaagtgttctatcgcaaatgttttacctgttctagcaaagccactttgaatttcatctgctacaaagacaatgccattatcttcacaaatttgtttaacggcttttacaaactggatatcaggtatgataaaaccgccttctccttgaacaggttccatgacgatacatgatacttcactcggatccaccgtttcgataaagaaatcatgtaacttattgattatatgttgtgtgtaaagttcatctgataagtcttcagatttttcagaaatattagggtatggtgcttgataaacttccggagcgaatggtccaaaacctaatttatatggtttcaccttactcgtcatagacatggttagattcgttctaccatggaatcctcttacaaatgagactacggcttgtctccccgtatattttcttgcaattttaacggcattttctacagcttctgcacctgagttaagcaaaattgattttttgtcaaaatgaccaggtgtaatttccgttaatttttgcgctaaatttaaatagctttcatacataatgacattaaaaccgggatgtataaatttatccaattgtgctttcaagtgtttcgtaatttctgggtgggaatgtccgacattcaaagtaccaatggcaccagcaaaatcaatgaacacattaccttcgacgtctttaacggttgcactttgtgcctcgtccgctacatgtaaatttccgtttcctacaccacgagctacatatttttcacgttgcgttttataatattcatatttctctgacataatgaaacctcctagttttaaacattttcattgattgtctagaaatttaaaatattattggtcttctgtaaagtaccagttatcggtttttaatggtaccagtttattcaataagtacactttttaaacgttgaactgcctctggtatgtgattttgttctatttttgaaaatccaataatcaatattttcgggccattatttttttgaagcgctttcactttaaatctattaatagtataaagttccaatttttgttctttcgcacgtgtttcaatttcttcatatgaatacggagaattcacttcaataataaaatgcaatcctgcttgtgtatctttgatttggatatgttcgccgaaagccatactcaaatgtgctataaggttctctctttttttaccgtataactgatgcattttctttatatacttttcataatgcccttcttttatcatcaaatttaacgttaaagcgtttagcatggaataatctggaattgtgttttgattttgtagttcaaattgtctaactaattttgttggtaaaatcatataactcattcttatactaggcatcagtgtttttgaaaatgtccctaagtaaataacactctcatttttgtcaaaactaaataaagacgggatattatctgtttcatatttaaattcactatcataatcatcttcaataatatagctatgtgttttactagcccaatttaataaatctatacgtcttgaaacgggcataattgtcccaattggaaattgatgcgatggcgtcacaatcactgcattaggttgaatgtctttaatgccctctaacgaaatccctttacgatccaatgcgattggctccatatgtatacgcgtttgttctagcaatgttctgaaacgagaatagccaggatcttcaactgcaatggttatatttttagtcatgagctcaattaatttggttaataatgcattggtgcctgatcctatgacaatttgctcaggatggcaatggataccgcgttgataggaaattagtttcgcaatcgattgtctaagttccataggaccctttacttcaggaatagatgatagatagtgatcataattttgaaaaacttgtttcatcattttagtccatgtatctactggaaattctgatatatcagtgctcatgtgtgagaatgaatattcaaattctgttgctgtatgctcatgatatgtttctaatgacggttgcttatcgttttcgataatcagtttatctatgggttcgatataatagcccttacgttcttgagtgtaaatataaccttctgctagcaactgttcatacgctgctttcacactatttatgctaatatctttatgtttggacatcactcgcttagacggtaatttttcatggctattatatttaaatgctaagatatcttcttttaattgtgtatatagttgtctataaatgtataagttactatcacgttgcatagcacacctcaattgttttgtttatcaaatcattatttatattattaaaatgtttttcaattattctaataattatatcatataaaaaaatcagtagttatacgatgataactactgattccaacaaaatttatattaaattaaatgctcattttgacttttataatattggtgaggctaatttggcgatggattgtttaaatttaatccagtttgaacgttgattataacgttcttctgttaattcttttgatacttttaaatcttctagaaatgctgctttaagttgtttcgtaatttgttcgtcatacataaaggcatttacttcaaaattcaattcgaaactacggatatccatattagatgaaccgacacttgccacttcatcatcgataatcatcatcttagaatgaataaatccattttcataagtatataccttcacaccatctctaattaattgcgcaacgcttgtaatggtcgcccagtatacaaagatatggtctggcttattagggataattaaacgaacatcaacccctgatttagcggcgattcgcaacgcattaatataacctttatctggtataaaatatggactatgcatgtatatggaggatttggcattcataatcattttcatatatccaaattcaatttgatgccaattatcacttggtgcactcagtgcgagttgcattgacacattaccaccttggtacgcattatctggaaaatacttcatattatattctaactgctcacgcttagcctgggagttccaatcatgtataaaacttaattgtaaggcatcaacgccgtcacctctcactctcaggtgtgtatctctccaataaccgaacttatcatttagacccagatattcatcgccaacgttaaagccaccaacataacctgtcatcccatcaatgacgacaattttacgatggtttcgattattcactctaaagttgattaatggtattttagcttggaaaaatgcctccacttgtccgccattttctcggaattttttaaatttcgacttatgtacagatttagaccctactgcatcataaagtaacttcacttcaagtccctcttctgctttttgttctaagatattaatgatttcagtacctaaaccatctaaattcaatacataatattccatatgaatatacgttttcgcattgcgcagatcttctttcatttgactgaataaatcatgaccatctgtataaatatcaatattattatcattacttaaaaaagaaggttcttttgttaaaagtgttgttgcaatatcacggtgttttctcacaataggattatcagaatcactgattttatttgtcgaatcttgtagttgggcttgaactcgtttcatcccatcttctatctgattgtgcgcaaagccacgttcacgtttcttacgaatacctcttccgaaaaatatataaatgaaaaatcctaaaacaggcataacaaaaagtaaaaataaccatgcccatgttgcagtagcatctcttctatccctgtctaaaaagactataacaaaggctaatatcacattgataacaaagaagaatgctaacacaccccgatatacgggacttacacctggatcaaatattaattgcataacttcacctcatcattctttccctaatagctaaaaatatttttaactataatgttttagttctaaaatcttatattacttatacatatattaattttaatacaattgtctccaatgtaatctgatttatttcacattgattcatacccattatatgccattataggtatatttaccattttagctttaatctaaattctataaaatcaagttaaacacttcacttttgaagtgattgttcgattgttcgattacgtcctgcttgtgaaccaaacaaagtaatgataactgctgtaaatagtaatatacttaaagatgcaatccaagtacccgtcatatcatgtagaacaccaaataataacggacccatagcggcaaataaataaccaatagactgtgccataccagataattttgctgccgtttgactatgttctgtacgtaaactaaagaacgtattaacaagtccaaaagcgattcccccagcaacacctatcaatattgtagagataatggccagttgaggtacgcataacataatgattacacccgcaataaacaacaatcctgtcacgaaagttaatgtaaattgcgatttcatcttagttgcaaatattggtgtgataaaagtaaatggaataattgaaatctgtaacacagataaatatacgcccgcttcactaatagacataccactctgcgacaagtatgctggcatccagttgatgagagaataaaatataagcgattgtccgcccattagtatcgtgatttgccaagaaattggagatttccacacattcacacttttacgaggtaacgctgtagccatttcttgtttaccttttaattgaaatgaccaaataattatcgtcactaatgttacgataccgattaagcttattgctacattataatgaaacgactttagcaatggcgcagtaccgtatgatgataaaccaccaaatacattcattacaacagtataatatcccgtcatgataccgatatgtaatgggaacttcgccttaatgactgcgggtgctagaacattaccaaatccaatacctataccaatcagaactgtcccaatatataaccaggaaatttctgtcattgatcttacaataatacctataaaaattaaacataaggctagaaaaatcgttttttctaaaccaaattgattacttgttcgtgctgcaaataatgaaatgactgcaaaagctaataatggtactaccgtaataacactaacagcactattcgacattgctaaatccgttttaatatcaggcaatgcgaccccaatagaagtaataggtgctcttaaattcgcaccgacaagtaatattcctataaataacaaccaattgaatggttttatttttctataattttccataatctatcatttaccaccttatcaggtctattttgaaaacaacacattatatggtacgatatgtacgttataatgtaaacaggagagatatatttgtataatattcaaagcatcgtagcaaaaaatattgccgattatcgaaaaaagcatcaactaagtttagataaagtagcgaatgcaacaggcgtcagcaaaaatatgttaagtcaaattgaaaagggacaatctaatccaacgattaccacattatggaaaatagcaaatggccttcatatttcattgtcgcaattaacttctacatccaatgatacaatcgattttattgacgaaagtgatatcatccctctcattgataaggaagtttcaatatatccatactttccttatgatgagaacaagaaattcgaaatgtttaaaatggaaatccaacctggtggcaaaatgcattccgaccctcaccaccctggttccgaagagtatattattgttaatgacggtgtattagaaatcgaagtcgatggtaaacaatatacaatcaatcatcatcaagcttttcgatttaatagtgatttgcctcatagttactttaatccaggaacatcaatcgtagcactaacttctacaatgtattatcaataaccaacgtaacaccctctgaatcatttatgacaaccctatacatcattgttatgtttcacattttaattgtgtggaatataaatagtaaaagcaatttagggaggtaatatgatgacttttgaatttaaacatgatttaggtacaagtgaattaccagaagatataacttcagcagtagcattagaattttcattcgttgatgcattagttgctttagatatagatgttaaaggtattgccgatgacggtgatagtacaaatttaacatcaccacttagagaagcagtaggcgattatgtctcagttggtacacgtttagacccagattttgaatctattagatcatcagcaccacaactcattattggtgattctgatcgccacaaagagatttatgaagagttaagtgaaattgcgcctaccattcttttcaaaagcttcgatgctggttatcaagaaacattagaagtattccaacgtattggtactgccgtttctaaatctaaagatgctaaagagcgtctagatagacatcaagctttagttaatgattttaacaatcaaatttctatagataaaaataaagaaacattagctgcagtcgtatcagaacaaggtgtgacagcgcattcaaatagcacgtatgtaggtgaatttttaactaaattaggctttgcaacagcacttaatgataaagttgcagacacattacctgcttatagagaatcagattatttagaaatgtcttatgaacaacttgcaaatgttaaccctgaaagattgatcgtgatggtagaagacgataacgataaagatttaaataaattacaaaatagtaatcaatgggatgacttagaagcagttaaaagtcagcgtgtacattttgtaagcagagatgactgggctaaattacgcggtcttatcgcttcagaagatattgttgaaactctagctaaccttaatgaagcataagcaatgaggtcataacaatgtaagctaacaaaaaaacgaccatttctattaaaatagaagtggtcgtttttctgcttttctttaatatgattaaaatttcaaggccgctaatccaatatttttcctgtactcagtgactcgtatatttatcttaatatctcttatactctctttttgaatcatcttataagcatttttcaatataaaaggcagattcttcaatggatttatactctgtattaataaccgttgcatttaatttttcaaaaacttcttctgcatgaattagctcttctttgattctatccatactattataatttgacggacccgataaccctaaaattttaacgcgctcattacgaatatttaaaatatagtcaggactcgcagttaaaccaaatactttcaaatgcttatgttttaaaacctgatctggaatatcaacctctggtaccaatggaatattcgcaatcttatagcccttatttgctaagtacatgcttaatggcgttttagatgttcttgaaacacctacaatcaatgcatccgcttctccaatatctgtaaaatgtttaccatcatcatatttcacagcatactccattgcttcgattctcttgaagtaattttcatctagtttacgtaatgccccactttctagtatggggttacattgtgtttgttgttgaataatgcctatcaaatcagacatataatcgatatacggaatttgcaattttttcgcaaggtgttgacctgcaatattgaaatctggattcactaatgtcgtaacaacaacggcattcaactctttagctctgtttaaaatatgcatcagttcttcttcatttttaatgaatggatatttttttatctctatttgtgaaatgtcaggaaattgcgttaacgtcgcatgaatcattcgttgcgctgtctctcctatagaatccgatatgacaaataatctcagctgtggtgcttgttggtcatcaaacatgtaatcggccaccttctacttcactttgcgcagttgaaagcaatgcacccggcactctaaatggcgaacaagaaacataatctatgtctaattgattaaaatattgaatggatttatgatctccacctagttcaccacacacaccaattgttatgtctggattcgctgattttgcttgttgtgaagcaatttttatcagttcacctataccttctacatctaacgtctggaacgggtcgtgctctaaaatgcctaattcagaataagtaccaataaacttaccagcatcgtctcttgaaaaaccgaatgttagctgtgttaaatcatttgttccaaaactaaagaaatcacattcttttgctaactcactagcaatcaagcaagcacgtggtgtctcgatcattgttccaatcatataatgaatatgttcttttgcttcttgttgtaatgtttcaattcgtgaaataatttgcgctttcagcgttgtaaattcagcaacggtggaaactaaaggaatcataatttctggttggcatgatacaccttgcgctttcagctccaatgcactttctataatcgcttctgcttgcatgatataaagttcaggatacgtaatggctaacctacatcctctatgtccaagcattggattcacttcatttaaactttcaatatactggtctaattccttaatcgttacattcaattgctctgcaactgttgctttttcgttatttgaattgggtaaaaattcgtgtaacggtgggtctaacaaacgaataatcgttggtcgttcaccagaaagttttagtatttcttcaaaatcattcttttggtactgcttaattgtgtttaaagcagcaatacgtttatcctgtgtatcagacaaaataaatctgcgcatttctatgagtcgctctggcgcgaaaaacatgtgctctgttcgaacaagcccaatccctttagcaccaaactgataacctgcttgaatatcttgtgctgtttctgcattcatgcgtacatctaatcttgcattttcttctgaccattgcataaatttctcaaagcatgactacgctctgcttggatgtctcaacttcacc

SEQ ID NO: 18 - DNA, 21159 bp, Staphylococcus saprophyticus
ggacatacctctggtgtaccagttgtcgtgccaacggcatcgctgggtagctatgtatggacgggataagtgctgaaagcatctaagcatgaagcccccctcaagatgagatttcccaacttcggttataagatccctcaaagatgatgaggttaataggttcgaggtggaagcatagcgatatgtgtagctgacgaatactaatcgatcgaagacttaatcaaattttaaatgttttgtttggttgaatcatattttacttactatctagttttgaatgtataatttcatacatttcattgtctggtgacaatggcaaggaggtcacacctgttcccatgccgaacacagaagttaagctccttagcgccgatggtagtcggacttacgttccgcaagagtaggacgttgccaggcaatttgattattccacagtagctcagtggtagagctatcggctgttaaccgatcggtcgtaggttcgagtcctacctgtggagccattatggccccgtggtcaagcggttaagacaccgccctttcacggcggtaacacgggttcgagtcccgtcggggtcatacatattaggagaattagctcagctgggagagcatctgccttacaagcagagggtcggcggttcgaacccgtcattctccaccattcttaattgaacagcttggaggggtagcgaagtggctaaacgcggcggactgtaaatccgctccttcgggttcggcagttcgaatctgcccccctccaccattaatgggctatagccaagcggtaaggcaatggactttgactccatcacgcgctggttcgaatccagctagcccagccattagagccattagctcagttggtagagcatctgacttttaatcagagggtcagtggttcgagcccactatggctcactcttaagtacttctcatatgagaagtactttttttatgttttaaattaattatcgctttgttgaaattaaatttatcattttctttttatacaatattatgattgaaaatagtaaaaacagtgtttttatcatcattttattgaatgataaatcattaaagtggttttatatgtaaaaagaaatgaaatagctaaatgtactgtattacccaaggttgaaaactcaaacgctttagattattctagtaacaagataacaacaaaggggttttatagatgaacaaaacagtagaaattataggtgcaccatctacatttggacaaaggaaattaggggtaaaccttggtccagatgcaatacgttatgctggtatagtagcaagaattgaagcgattggattaactgtaaaagattctggcaatataaatgtaccagaacttaatttaaataaattcaattcagagcaacaaggactacgaaatttagaggaaattattgaaacatctgaaacattaagtcagtctgtttccaatagtatatcaaataaccattttccattaattttaggtggtgaccattctattgcgattggttctatttctggagtcagtaagcattatgaaaatttaggagttatatggtatgacgcgcatggagatttaaatataccagaagagtcaccttcaggaaacatccatggtatgcctttaagaatacttgctggcgatggggatgacaagttagtcaacattgctaattatgcgcccaaagtaaaacctgagaatatcgttctcattggtatgagagacttggatgtaggcgaaagacaatatattaaagacaataatattaaaacatatacgatggctgaagtagatagatatggtattaaacaagtcattaaagaaacaatagactacttgaaagaaaaaacagatggcattcatctatctctggatgttgatgctttagatccagttgaaacacctggtacaggtactagagtattaggtggactaacttatcgtgaaagtcattttgcgctagaatttctacataattctaatttagtaacttcaatggatcttgtagaagttaacccattaatagatcataataatgatacagctgaacaagctgttgggcttgtaggcagtttctttggagaaacgttattataaataataaagcaaactgatgtagatgcattctacatccgttttcgtttattttagataaaaaataaatactaaatatgacagttagtgttatgattggtataataggtaacatgggaacagataaccggaggagatgttatggatttatccaacttttttgacgactggagtacagtaaaaattattgctagtgtactcgatttactcatcgtatggtatgtactttatcttctcattacagtttttaaaggtaccaaagccattcaactattaaaaggtattgtcgtgatagtgattggccaacaattgagtaaaatgcttaacttaacagcaacatcccgtttatttgatttagttattcaatggggtgtattagcattaattgtaatattccagccagaaatcagacgtgccttagaacaacttggtcgaggcagtttattcaaacgatattctacgaatttaaatagtgatgaagataaattaatatcatctgtgtcaaaagctgtacaatatatggctaaacgtcgtataggtgctttgattgtttttgaaaaggaaacaggtttacaggattatattgaaactggtattgctatgaattcagaaatatcacaagaattattaacgaatgtgtttataccaaatacgccattacacgatggtgcaatgattattcaagcaaataaaattgcaagtgcagcaagttatttaccgttatctgatagcgcaaaaatagcaaaaagtttaggtacaagacacagagcagcagttggtatctcagaagtatcagatgcatttactgtagttgtatctgaagaaacgggttcgatttctgttacatttgatggtaaattgagaaaagatatttctaatgaagcttttgaagaactactagctgaacattggtttggcacacactttcatgagaaaggtgtgaactaatatgttagaaagtaaatggggtttaagattaatcgcattgatgttagctgtattatttttcttgtcagctaataacatgtttggaaatatttttgatgcagataacttaagtcaaaaatcatctgaaactattcaagatgtgccagttcaagtgaaatacaataataaagaactttatgcaagtgaagttccaaataaagtagatgttgaaatttctggaccacaatcacaagttttaaaagcagaaaatggtgaaaacattagagctattttagatcttagtggtgaaaaagctggtaaacatacagctcaatttaaaattaatggattaaacaaagatattgattacacagtgaaaccaaaagaaacaactgtttcactggaagaaaaagtaagtaaaacatttaaaattgaaccagatgtaagtaataatgatttgaattctaactataaaataagtgaacaaagcgtttcacctgatacagttaaagttacaggtggacaaaagcaactagataaaatcgcttatttaaaagctacttataaaaacaaaagtaaagtttcaaaagacactacagacgttgcgaaaataacagcatttgatagaaacttaaacaaaattgatgtttcaattgaccctaatgaagtcaatttaagtgttaaagtagaagattatagtaaaaaagtaaaagtgaaaatgaaatctgttggttcgctttcaaatggacaagaagttaaagatattaaattagatgataacgaagttgaaatctatggtaacaaagacgacttagatgacattgatgaaattactgcaagaattaatttggatggcgtttcagatacaactgagaaaaaggtagatttccaagttccagataaggtcacaaaagttagtccgaaagataccactgcaaaaataacagttaaatagatttttaaaataaaggagatatatataatggcaaaatattttggtacagatggcgtaaggggcgttgcaaataaagaattaacgccagaacttgcgtttaaattaggacgctatggtggctatgttttagcacataatgaaggtgaaaagcatcctaaagtactagtaggtagagatacacgtgtttctggtgaaatgctagaatctgctttaattgctggattgatttctattggtgcagaggttatgcgtttaggtgttatttcaacacctggtgtggcttatttaacacgtgaaatggaggctgatcttggtgtaatgatttcagcttctcataatccagtaccagacaatgggattaaattctttggttctgatggatttaaattatcagatgatcaagaacaagaaatcgaacatttattagatcaagataaccctgatttaccaagaccggttggcgaagacatcgtacattactcagactactttgagggcgcgcaaaaatatattagttatttaaaatcgactgtagacgttgatttagcaggtatgaaaattgcactagatggtgcacatggttccacttcatcacttgcaccatttctatttggtgacttagaagctgatacagtaacaattggatgtaatcctaacggttataatattaatcaagaagtaggatcaacacatcctgaatcacttgctaaagtcgttgtagaatctgagtgtgattttggattagcctttgatggtgatggtgatagattaattgctatcgatgaaaagggaaatatcgtagatggtgatcaaattatgtttattattggtcaagctatgagtaagaatcaggaattaaataataatatgattgtttctacagttatgagtaacttaggtttctataaagcacttgagaatgaaggtatccaatcaaataaaacaaaagttggagatcgttatgttgttgaggagatgagacgtggtaactataatcttggtggagagcaatcaggtcatattgtattaatggattataatacaacgggtgatggcttgttaacaggtgtacaacttgcaagtatcattaaaatgactggtaaaagcttgagtcaacttacaagtcaaatgaagaaatatcctcaatcattagtcaacgttcgtgttactgataaatatcgtgttgaagagaatatagatgtacaggaaataatgactaaggttgaagttgaaatgaatggagaaggccgtatcttagtaagaccatcaggtacagaaccccttgttcgtgtaatggttgaagctgcgacagatgaggatgcgcaacgttatgccaatacaattgctgaagtagtccaagataaaatgggcttagacaattaatatattttaaaggaaagagactgagacataaatagatgcctcagtctctttcttaatagagtagtagatgttattgtattgaaaatagtttaatattatataagctaaggcacatgtataagactactagaatgattaatgattacatgagctaagctcatgcataagaactactagaatgattaaggattacacgagctaagctcatgcataagaactactaattcacataaaatgtgaaagtagttctaaaaagtggctctaaaaataattttgatataaaaaagcacgaataggctgaattaagcttatccgtgcttttttaattatagattaattttacaatacattatattcttttactatttctgaagttaattgatcatctgttttagcaaatgatttcaagaagccttctacaccatgtttatcaatgtactcatttttttcaactgtttcttgatcattggtatcatcatattttaataataatgccgctgttttgatgagtgcatcatgtttcaaattattttggtataaataagatagtggtttaatgattctatcttgtggtccgattttacgcatagtgcctcgtccaacacgtgttacttcgtctgataaattagggtttttgaaacgaccaatgattttatcaacgtattgagcttgttcactttctgtaaaattgaattgtgttgtaatatattgacttgtttcttttagaacattttctaaaccatgtctaatattatcatcattaacagcatctaatattgttggttggccataaaatctacctgcataagcaagataagcatgaccagtgttaacagtgagtaatttacgttcaatgtatggcgttaaattgtctacatatttaatatgatctaattctggaccaaaccaagcatctttttcaattacccattcgtaaaatggttcaacgataacatctaaaagattgtcatttgtttgtaaaggaacgatgcgatcgacagcagagtttgcaaagtgaatatgatcacctaaaggaccagtgatatctaaaatggcatcttttaatgtatttgtggccattattgcattttcacaagcaacaatattaactggcgtctctttttcctttaaataaggtgcaaatgattttgcaataataggcaagatattaacgcctacagcagtagtaattaaatctgcttctaatacggcttgttttaggctttcagaagggccacctgaattaattgcatcgacattatgcacacgtgtagttgtttttgcttcatctgctaggatgacatcatattgatgttctttatctaaagcatttataatttcttcgttcacatcagcaaaagtaacttttacatcgttatccgcaagaatatatccaataaaaccacgaccaatattacctgcaccaaagtgtaatgctttcattatgcttcagcctcctcaaagacttgtttgatttcttcagcagatgatgcattaataatacgatcaacgttttcttcttcactaaaagtaatcgcaattttagaaagtaaatctaaatgttcgccatctttaccagcaatacctacgacaactttaacttcttcaccttcccaatcgacaccttcaggaatttgaattaaagttagaccagattttaatacgcttgttttagcttcatctgtaccgtgtggaatggctaaaccattacccataaatgtagatacaacttgttcacgatctttcatagcttgaatataatcttcagtcactgcaccgctagatactaaggcatgacctgctttttcaatagcttcgttttgatcctttactgtttggttaataaaaatgttttcattgctaaataattcgctcattgtcttcactccatatttaataaattttgtaattgtatcagataactttgcttcaataaaacttgaagttgttcgggtctttccataaatccatcgatattatcaagatgccctaccatttttccagatatttcacttaccaattgagacatggtgtcatcgggaggtacaaacatatttaataaatatctcacggattgattgccattttgattacttttaagcacaataggctcatttaaaatcgttataagtatgaatggttttttgatgatatcattttttaaatgaggtatagcgatagggtagggttctaaaacaaacccttgactgtccatatgttgcttaataagttcagcgaatgacggcccatccgtaataatttgatgtgataataatgttgatgttaaatactgactccaatctgataccattgtgtagtcaatatttaccgaatcgataatttctaaaccttttcgtatataatttagtttgtcttcaggatttaaaatattatgatgcttcggttcaatagcttgatgcttaaattgatgttgctgtgtatttaagaacgctgcaacatgattgatatctgcatcaggtagtaggggatttactgtaatataaggggttgtaatatcgatatctacagtagaaataattgcatcaaattgtgatgtatccattttttttaaatcacccacagaagcctgtgtagttttttggatttcgctaaaggtttgttgcaaacgcgtagcaagtaaacgactcgtacctataccactactacatacgaccagcacattatataagtgagcaccttggctttgaatagcgccgccaaaatgtaaaacaataaatgcaatttcactatctggaaatgtaaaatctggccaagtttgtaataaggcgcgatgtacattttcaaataatcgcggatatttgtgcttaatcatttcagttaatggattatatgtttcaatattggcatttaatctattaatagctggaatgatatgcaattttaaaccttcgcttaaagtttcagtatctttaaatgtttggtgtgaaaaatgcgtgactgactgtatgaatttttcgatttttgattcatctttactgtctttaaatacttctgcagattcttttcgttttgcgccgcggaggtgaatcgtaataaaagtcacttcggcttgattaaactgaaccccgtatatatgctcaagatgtagtgcaagcgcttgtgccacctcatgttcaaatgaatctttaacactttgataaatatcgtcgttcaatgcaacatactgaccatttaacatccgatcaatacttaagacgatatgcactgtaagggttaaataactagactcagtcaatgagtagggcaattgatcgagatggtccataagaattcgttcaatttggaaaatcttatccatatctaccatagctagttgggattgattaatagattgataaacaaagtgattttcgattacggaataaacactggtactatttaggttattgaccattaattgacttaataattcacgttttttagattctgcgccatgtaattgaataccttctccacgttttttgtgtaaacgtaattgatataaatcaagttccacatcgagctcatctaagagtttcgttagtgtttgattcgatacaccaatttcttgtgccaatccatattgtttaataggggtatcagattgtatcaatgcatataaaatgattactttttgttcttcttgtgataaatctatggtgttttcatgcaataaggcatgtttcagtgaagatagagcaccttcacttgtattgagttgtatgcctttttttgtgacgcgctctaatgctatatcaaaattagataggaacgattcaattgattttaattctctatgaatagtacgagaggatacagctaagttttgagcaatgtcgtaaattgtgacatattgaccgtgatatttaattaacatttcgataatttctttttcacgtgtactcaaaaacatagccataccctccagtattgttctatatagtgattatttattatttaagattttcaagtaattcatcatatctaggagagtttaagaaattatctacagagatatggattgcatttggaacttgtttgattgctctgtcagtaagtttcttctgagtgataacaagttgtgcatcgctaggcaattgattgattgcagtatttgtaacatttacatcttggatgcctgcttttttaaatttattacgtaacatacttgcacccatagcacttgatcccataccagcgtcacaagcaaatataacatgattcactttactataatcatgtgcgtctacattttcagtatcataattatctaacaatgcttcttctgattgttcttcattattttctgaagttgaagtagaagcggtagttgaagttgcattattatcttcattcccttttagcttagaagatacacttgattttttcccttttgaagcttccattttttcggtagctgcttctaagtcttcttcaggctcttttgtgaatttcaaaataagtgctgccacgataaatgatacgattgctgctaagagtacaccaagcaccatgtgtaagaattcacctttaggcgcgttcaacatataaacgatgaatgaaccaggtgaggcaggactcttgaagccgaaatcaagtaatgaataagttgccacaccagtcataccacctaagattacagcgataaataataaaggacgcattaatacgtatgggaagtaaatttcatgaataccacctaagaagtggataatccctgcgccatatgatgttgcttttgctgtacctttaccaaaaatcatataagcaactaaaataccaagaccaggtccagggttagattcaattgtgtataagatagattgtccagcagatgctgcttgatctgcaccaagtggtgtgaaaaccccatggttaattgcattgttcaagaagacaatcttagcaggttcaacgataatacttactaatggaagtaaatgtgcatgtaccaatgcttcaacagcaagtgacaagatatgcataataaattccataattggagctaatattttaaatccaacaatagtcatgatgaatcctaagataccagctgagaaattattgaataacatctcaaaaccttgtggtgttctaggttgaataaactcatctgttttcttcattaaccaacctacaagtggtcccataatcatagcaccaagtaacattggtgtatcaggtaatgctacgataacacccatagttgcaacagcagcaataataccaccgcgcatttcgtgaattaaacgaccaccactatatgcaataagcaagggaattaaatatgaaatcataggtccagctaattcacttaaatctttattaggccaccaaccaccatcaataaagattgcagcgataaagccccatgcgataaatgcaccgatattcggcataatcatactacttaaaaatgaaccaaatgcctgtaccttacgtccaagacctttgttttcttgcgtctctgtttgtgacatagaattgcacctctttttctctttttatttataactttattgtatgggggtacaggggaataaacaatagaaagtaatttcaaatttgtcacagtatctttgacaagtttgtgaatataactggacacttcataaatatggatattacatgttaaatgtcactgattaagcacaaagttattttgtaaataaattgttaataaattatttgcattaagtaataagaacattgtacaattaataatattgataggaaggaggacagtttaagcgttagttcaattaaagcgcctgtacaagtgaagaggttatgtgtttgtaatttaaggtttataacagaaatcttaatagacacgataatcgaagtttgtagacgaggagggtagttatcgaaccatcggcggatgctatcccggatgtggctcattcgttaacttattaaggaaaacattagggtaacctggtgcacaaagttaataagatagccaaaaattaaatataaaaatatacggtgaatgagataaccattgccatcaaggtattttcaatttctatatgataaatatagggataagtctgccttcgatggtttatattaaattggacaggttcgaattcgctagaagttcaattatctcttcaccattaaattggaggaaattttaaaatgtgtggaattgttggatatattgggcaagataatgccaaagaattattattaaaaggtttagaaaaattagaatatagaggttacgactcagctggtgtagcagtggtaaatgatgaaggtacttcagtattcaaagcaaagggtcgtatcgcagaattaagaaaagttgcagatagtgaagctactgacggtaatgtaggtattggtcatacacgttgggctacacatggtgtgccaaattatgaaaattcacatccgcatcaatcaacgacggaacgttttacattagttcataatggtgtaattgaaaattatgaagaattaagaaacgaatacttatcagatgtatcatttatttctgaaacagatacagaagtcattgttcaacttgtagaatatttctcaaatagtggccttgatacagaagcagcatttacaaaagttgtttcactattagacggttcatacgctttaggattaattgataatgaagataaagatacaatttatgtagctaaaaataaatcaccattattaatcggtgtaggtgatgactttaacgttattgcatcagatgcaattgctatgttacaagttacaaatcgttataaagaaattcatgaccatgaaatcgttattgttaaacgtgacgaagtcattatcaaaaatcaaaagggtcaagttcaagaaagagaagcatatactgcacaaatagatgcagcagacgcagaaaaaggcgtttatgatcactatatgttaaaagaaattcacgaacaacctgcagtgatgcgtcgtattatccaagagtaccaagatgaagagggtaacttgaagatggatccagaagtgattaaagatgttgccgaagcagatcgtatctatatcattgctgccggaacaagctatcatgctggtttagtaggtaaagaatttattgaaaaatgggctggtgtccctacagaagtgcatgtttcttctgagtttgtatataatacacctttactttctgagaacccactatttatctacatttctcaatcaggagaaacagcagatagccgtgccgtgcttgttgaaacaaaccgcttaggtcataaatcattaacaatcactaatgtagctggttcaacattatcacgtgaatcaaatcatacattattgttacatgcaggtcctgaaattgcagtagcatctactaaagcttatacagcacaaattgcagtattatctatcttgtcacaaatcgttgctaaagagcatggtaaagatgttgatgtaagtttattacgtgaattagcaaaagtaacaactgcaatcgaaacaatcgtagatgatgcagatattatggaacaaattgcaacagatttcttaagaacaacgcgtaatgcgttctttatcggtcgtactggagactacaatgtcagtttagaaggcgcattaaaattaaaagaaatttcgtacattcaagctgaaggatttgctggtggtgaattaaaacacggtacgattgctttaattgaagaaggtacaccaattattgcacttgctacacaagaaagagtcaacttgtctattcgtggtaacgttaaagaagtagttgcacgtggtgcaaacccatgtattatttcaatggatggcttgaacaaagaaggcgattcatatgttattccacatgtgcacgaactattaactccattagtttcagttgttgcattacaattgatttcatactatgcagcattacacagagatttagatgttgataaaccacgtaacttagctaaatcagtaacagttgaataaagagcatatgattaacagctaattagtagtgctattgtaatatctaatttaaatgcatgaaatcatatattgtataaatagggcaagaatgaaatcaaacttaaagttttgatttcattcttgttctttttttataataaaaaatatgactttgatttatatttcagtgatatacagtgcaataggcagtatattgagaactaaatgtttgaggtatgtagttaaatgatagttattgtggattaatcatgaattgtattgttttaaatgagtagcactaatataaatcaacgataacgattacaatcaaatttgaactttaattattatataaatcaaaatatttttaaaatgttattatgtttattatgcttatcatcataactagataaactttaaaagtgagttgaatatagtggaaaaacctaaaatttattctatggcttttggaaaagtatacgatttattaattaaaaaagtagagaaaaaggatagaaccaaacaagaagcggatgaaattataagatggatgacaggttacacgcaatcagagattgatcgcttggttgcggatgggacagattatgaaacatttataaatcaagcgcttaacttaaatccagagcgaacaaaaataacgggtgtcatttgtggtgtacgtgtagaaaatatggaagcctccgttatgaaagaaattagatatttagataaaatgatagatgaactggcaaaaggaaaggcattggataaaatatttagacaacacaaatgatcgaataaaggtgatttgttaagtcatgttagaaattgcataagagaaaaggggtataacatgttaattgacttgaaaaatatatcacgtagaaaacaaggtaaggaaatcattaaaaatgtgagctggcaaattaacgaaggtgaaaaatggatgctttatggcctaaatggtgctggtaagacaacattgctaaacatattaaacgcctacgaaccaaatactgctggaacgataaacttatttggcatgcaaccaggaaaagtgggctattctgctgaaacagtcagagattacatagggtttgtttcaaatagtttaatggatcgttttcaagatggtgaattggtgcgagatgttgtaattagtggcatatttaattccataggtgtatttaaaactatagaaccacatcatattgaattggcacaacaatatttagaacaaatgggaatgcgtgattttgagtcaaaatactatggttatctatctacaggagaacgtcaaaaggtacttattgctcgtgcgctgatgggtcaccccaaattacttattttagatgaaccagcatctggcttagattttatagcacgagaagatctgttacaagcgctcgaaaaattataccaacaacaacctgaattagctgttatatatgtgacgcattttattgaagagattacacaagatatacaaaaaggctttttactgaagcaaggtaagaattataaacaaggtaatattaaagatattttaaatagtgatgttatgagcaacttttttaatagaaatgtcaatgtacgctatcaaaatcaacgctacgcactatttatgaataatgtgtagattgcacattagcatagttaatgccataatttaagatgatcatatgtgatggaggattatataaaaatggataatgttaaggcaatatttttagatatggatggcacgattttacataaagataatcgtgttgatttagaaacaacagaagttattcaacaattaagagataagggatataaagtctttttagcaacaggtcgtgcacataatgaaatacattatcttgttcctgaatcatttgcagtcgatggtattattagttcaaatggtactttaggaatggttaaggatagcgttttatttaagcacagcttgtcttacaatgctgtaattgacattgtacaacgcgcacaacaagaggcaatctattatgaaatattcccatttgacagtaatcgtattgttttacaggaagataaagcatgggcaaatgcattatttgaaccagccacgccaccgggtgatgtaggtgtttccgaatggtcttctcgaaaagcttcgctcgttgataaggtggattgggaaacaagtatacctgaaaaatcattttcaaaaatttatttattttcaccagatattgaaaaaataacaaactttagaaataacttattaaaagatcaagataagttacaaattagtgtgtctaattcttcacgttgtaatgctgaaacgatggcatatcgtattgataaagggacgggtataaaagaaatgattgagcatttcggcatcgcgcaacaagaaacattagtgattggagatagtgacaatgataaagctatgtttgcatttggtcattatactgtcgctatgaaaaatgcacgtcctgaaattcaagctctagcagatgatgtgactgatgatactaatgaagataatggtgcagcacgttatttaaaagcacgtttcttacaagattaaatgataggcatagagaaaataaggtagtcatctaatggctaaatgaaaaagagtccgggacatctatttttgtcccagactctttttgcatctgcgtgattatttttcgaatgatattacttgtcagttttatttagattgttttttaaatctgatgtttcatctttgactttgtcttgcatgttttcagattgctcagtaacattcgattttgtcttttcagttgtattcgttacactgttgcttgctttagattgcttactttctagttcattatctataggttgttttgactttttatttttcttaacttttgtagtttcaatgctttcaccattacgattatagtactgaataatcgctaatatatttgtatagtaaacgattaatctaatgataatcacaatgactgtaacaatgtaaataattaccattgctaatgtttgagacatactaccagtaaatatagcaaccaattgactaattggattagcaagtaggatgacgattaaatttagtaataataaaccaaggtagaatttgaaccaagttttttgaccatttttaatgcctttaaatcctctttttactgatgaccatgcaccattactaggttctttaacaaaagctaaagtataattgattgcgataatcgctaagaaccagtaaatgaatgattgaataaataatacgattgttgctgcgacaatttggtaagcaagagaccatccaagtgcatgatcagaactacttaatggtccttgtaatgctgaaaatagttgaacgattcctaaatttagtacttttgaaactagtaaattaagtaacaatgcgataataacaaaaactaaagtaaataaagaaaattttaatccttttaagtatttgccttttttaaatgttgaaaataaatctttgaaatttaccttgtctttatttaaagctttgtctatagtgtagatagttccagctattaatgggtaaccaataaatataaatacgattaatggtatgagtattgcaagtacaagtgaaaatatggcgccaccgataggttgttgcatagccattgccattaacaatttataaatagcgggttgtactggcataaatgtcaggactgttaaagcaaacaatattataaaacttacaattgtgaacattaaaattttagcattttggggttttgcattttgtaatgctaatttatgaaatttaaacaaattttaagcactcctttttagtcataaacatacgatatcaaaaatttgataattttaaaattaataggtaacaaattggcaataaaatgttaaaatgtcctaatgagaaaaagttgaaaggagatatcatcatgaaatttgcaataattactgatgttcatggaaattttgatgcattagaaactgttttagatgatattgatagaagagaagatatcaataagatatttaacctgggtgataatatcggggttggacatgaaacgaataaagtacttgatgaaatttttgacagagatgatatggaaatcatcgcgggtaatcatgatgaagcggtgatgtcgatagtgaatgacacaccttatcctgaagacttaaaagacaaattttacgaacatcaccaatggattgaaagtcatttagatgaagattattacgacagattaaatgaactaccacgtgtgattgaaaaaacatttaatcaaaaaaaagtgctgtttattcattatgaaataccaaatgaacaattaactacaccgattgatggtcaaccatatagtccaattgtggaacctagtgaagaaaacataaaagctttgtttgaagataaacaagcagatttaatcgtgtttggtcacaaccacactgtacatttatatgatgataaatctacagtttattttaatccgggctctgtaggtcttaataatggtgcatatgcagtttatggtattgtaacgattgatgaaaatgaattttcaattgaacgtgttaaagtcccatatgacaatgaagaatttataagaggatttgacgagaaacaagtaccagctaaagcgctgatatttgataaatttttataaacacgtaatttaaacctatatatgctgtatataggggtagactatcaataatgaaatcccaagtagtgattaatattagaagtagtagaaatgctaaattatactaaagaagcgagcatgcgaaatcgactttgactttcgtacactcgctttttttaatttgtttaattggtcaagatttttaatgatcatgtgcatgattgtgtgcagtagttttatatatagatgaacataacgtctcatcgtcatgttggtgatctttggtttctaactgaatcgtcatatgttgaatattcaattgttgtagtttgtgttctattttatttaacaattgctcaccttgagctactgacatctcatgagggacaacagcgtgacaacttaatgcatttaattcattagatattgtccaaatgtgacaatcatgtacgctttggattgcatcctcttccttaatagtggcaatgacttcagacatatttatatcgataggtgtaccttccattaaaatgtttaatgaagactttgtaatgccccaactacttttaataattagcagtgacacaatgatactagctattgggtcagctatcgttaaatttaaagtccatatgagtatcgcagcgataatagctccaacagaacctaaaaggtctcccataacatgtaagaaagcaccacgcatattaatgttatgcgatgtatcgccacctctaaacattaataaagcaacaatgatgttgactatcaggccagtaacgctgatgataaacatttcagtcgattgtacttctactggattaaagaatctttcaatagcttcaataatgataatgataccaatgacaaaaagtgttacgccattaaaaagtgcagctaaaatttcgaaccttttatacccaaaagttttatttttatttgcatatttttcggcatagataaaagcaaggagtgcgacaccaagtgaaattgtatcactaaacatgtgtaaaccatccgaaagtaaagccaaactatttgctaaaaaaccaccgattatttcgacaatcataaaactaccaataattaaaaagctgataagcaatatttttttattattagtgtgtacatgaccgtgagcatgattatgttcgtgatgttctgacatatgaatatccacctttcaattattgtttatgtgaggcatgatgaattgcttgttttattaaagtagtcacatgcgtatcatctatttgataaatcatagattgcccatggcgattcgatttcactaaatgtgcttgtttaagaatacgtaattgatgtgaaacatttgattggcttaaatttaaagtgtgtgcgatgtgacctacactacattcgccttgaatcaaaaggtgcatgatacgtaggcgattaccttcgcttaacgctttaaaaatatcggtgacatatgttaccgtttgttcattaattgattccgccatatctactaacctcatttcttcacattaatatatgaatatttgttcatatattaatataattttgttgaatagtcaatgttcaaagcacaatagttttaaaaatatgtagaagtgttaaaatgaatttaagattttattgaaggaggctatataatgagtacattagttataggtgcaaacggtggcgtaggtcaatatttagtaaatcaattaaaagaaagtggcgaatcatttgtcgcaggtgttagaaaagaagaacaagtgcaagctttagaagacaatggtgtgaaagcgacattgattgatgttgaagctgatgatattgaaacgttaactcaaaagttacaaggattcgataaaattgtattttcagtaggatcaggtggtagcactggtgcagataaaacaattagcgtagatttagacggcgctatcaaatcaattaaagccagtgaagcaaaccatgtaaaacaatatgtcatggtgtctacttatgattctagaagagaagcttttgatgcaagtggtgatttgaaaccatacacgatcgcgaaacattatgcagatgaatatcttaaacaagcggatgtaggttatacaattgtgcatccgggtatattgttaaatgattctggcataaacaaatttgcagcagatgcatttttcgaagataaaggttcaattccacgcgaagatgttgcttcagtcattaaagaagtacttgcaacggatgattatataaatactgaatttcaagttgtgagcggtgaacaatcaatcgaagacgcattagaccagtttaaaaataaataaaatataattaaataaagaaccaatttacatgatggtgtaaattggttcttttttgttagaaataattgcttttttaagcaaattacgagcgaaaatttgatacaataaattatatcgcttggaggttaatatgaatatttcaaacccaaaaatatatgaacaagttgcagatatcattttagaaaatattaaatctgaggattatcaggttggtgataaattaccgtctatccaaaaattaagtaagcaatttggagtaagcacagcgtcagtgagggaagcgttgaatgcactgagaacgataggcgtaatagaaatgaaacaaggatatggtacttttatcaaacaaattgagcctactttttttgaatttggggacaaattcaattctttagttcaaataaaagaattattagaactcagagaaattgttgaaagtgcaacagtagcaaatgctgcacgataccgtaataaagcagatttagaaaagctagcgacagcattgtctgtgatgggggaagcagtaattgatggcacttcaggagaaaaagcagatttagaattccaccttgcaatcgcacatgcagctcaaaattcattattagtagagttattaaataacatatcagaacttatgcaaaattcaatggaagaaactagaaaaatatttatctatgataaacaaaaaacaatgactaaattactcgaagaacacgagatgatttatcatgccattttagagcacgatgataagacagcagttaaagccatgcaatctcacttactcgaagtaaaacaaaccatattagctaacttcaaagaaacataatgaaaaaagcgccatttcacatgataatatgaaaaggtgcttttatcatgttgtgtgggattttagtaattttagagcaaggtacttatacgtacatgaaatat

SEQ ID NO: 19 - DNA, 26087 bp, Staphylococcus saprophyticus
taaaaatcaaatataaaaaacggtgaaatcatatctttttaaaattaggatacaaatccaccgcttttgccacatactgtattatcattgtattcaggtactatgaaacttcattttcatcatgtactataaatccattgttacttgcactattatttaaaaacgctaaaatatatcgcatgacttcatcacgttcaggctcgttatgaatttcatgatataatccttcccacgctttaaaataaagttcttctgtcattattttatcttttattaaatccattgcgcttatatctgcaactctatcttctgtaccgtacattaataataacggcaatgattttacatcttttaaatggttgactgtctctttcataatttcaataatctgtttataccagtagtaagttactttatttaacatcaattgatctttattcgtctcttctataacttcttcgtttcttgttaaatcttcaactgtaataccaactttaaatcgagtatctttcgcaattttacctatattagaaataattttatcttttctagatttattacttttcttaaattctaaaagtggtgaaagcaacatcaggccttcaatcggcacttctgttttttctaataaatttaagacaatcaaaccaccaagacctatacctaggacataagttggaattttatattcatttgcgattctaatccattcaagtatatgctcatgatatgcatcaaaattatcaatttgacctttatttgaacgtgatgtttgcccttgtcctggcaaatcgcccataataacatgatatccatttcggcgaagcatcgtaatcacatatgcatatcttccagtatgttcaagcatgttatgtgcaattactacgacaccttttgcttcattttcggtttcccatttccacataatccatacttccccttctacatttaaattcattacgcttattgtatcaaaatacgctatgctttttccattttaaacatattaaataaacataaaactaaatttatttcccacaataaatttcttatttctgttcaatacatatctcatgagtgtatattgaaatttaaagtgtaacatattttattgtaaacgatttcattactattagattcatgctacactattattgaaacatagctataagcggaatgggaggaattaatatgccaattgtgaaagatttctttatcggattatcaaataattcgtttttaaataagactgccaaggaagtaggacccatgtttggggcgaataaagtcgttgcgggtaatacgattaaatccttgatagacacaattgaacgtttaaacaacaagggaattacagtgactgttgattgtcttggagagtttgtcgtaactgaaggtgaagctatccaagctaaagatcaaattttggaagtcatgtatgccatttataatcatagtttagctggacatatgtctgtgaaattaagccaactaggttcagagtttgatatagatcttgcttaccgtaatttacgagaaatattattgaaagcaaatgaatttgataatatgcatattaatatcgatactgaaaagtatgatagcttgtttgatatcactcaagtattagatcgattaaaaggtgaatttaaaaatgttggtacagtcattcaagcatatttatataaagccgatgcgctcatagataaatatcctgaactaagattacgcatggttaaaggtgcatataaagaaaatgaagttatcgcttttcaaacaaaagaagaaatcgacgaaaactacatacgtttaattaaaaaaagattgttaagtgctaaaaacgttacttctatcgctacacacgatgataaaatcattacacaaatcaaacaatttattaaagataataaaattgataaagatcgttatgaatttcaaatgttatacggctttcgctctgatttagcagaacaaattgccggcgaaggcaacaatttctgcatttatgtgccatatggagatgattggttcagttactttatgagaagattagctgaaagaccacaaaatttgaatttaatgtttaaagaattgttaaaaccagatatattgaaaaaagtaggcactattgctggcatatttgctggcgttgtagctacaggttcaatactatatagagtacttaaaaaataatcaattcaatgttcaatatataaataattattttaaaacaattcactttttaaacactacatctaagtaatcatacgagcacaaattttaagttcaatgatgtttaaaaagatttacatatccgaattctaatttagatagtcattgaatttattataaaaacaaagaacgccaaagctgtcatgtctttggcgttctactaatttaatataattgaaaaacgatacgatattaaaaattgataagcattagacaagtttaactttatatttctcttaataaattagccatttctatcgcacttactgctgcttctgcacctttattacctgctttcgtacctgcacgttctactgcttgttcaatattttctgtagttaaaataccaaatatgactggcgtatcagtaacatcattcgcttttgaaacacccttggctacttcgttacaaacgtaatcgtaatgagacgttgatcctctaataacacaacctagagtgataactgcatcataatcatttttcttagctaattttttagctactaaaggaatttcaaatgctcctggtacgtatgctacatcgatattagcttccggtacttcatgtctaattaatgtatcttttgcaccatctaataatcgattagtaataaaatcattaaatctacttacaacaatcgctacttttaaatctgaacctactaatttaccttcaaaattcattgttcattacctcctatattaagtgacccattttttctttttttgtatccatataatcctgattgtatgcattggttggtacgatgagttcaattctcttcgcaatatgaatgccatatgattctaaactttcaaattttttcggattattacttaataaatttacactgtccacaccaaaatattttaatatttgggcagcattttgataatctcttaaatcttcttcaaatcctaatgcaatatttgcagaaactgtatcataaccctgttcgattaattcgtaagctttcaacttattaattaagcctatgcctctaccctcttgaggaagatacagtatcatgccaccatgctctgctatatatttcatcgatgctgctaattgttcaccacaatcacatcgttgactatgaaaaatgtcgccagttaaacatgctgaatggattcgaacattttcagttttattaatgtcgccattagcgataacaacaatatcttcttcgctattatctgtagtaaagccatacatatcaaagttaccgtattctgttggcatcttaacttttgcttttgcatctagtttagaaattgaagattttcgatacttttctaagtcttcaatagaaatcataactaaaccatgcgtttctttaaatgcttctaatgacgctccttttgccattgtcccatcttcatccataatttcacaaattaatgctgctggtttagcgccagttaatttagctaaatccacagacgcttcagtatgaccacgtcttgatagcacaccattatcttgtgcaattaaagggaataaatgacccggtttattaaaatcagatccagtagcttgctcatcgatcaatgctctcgctgtcattgttctttcgtctgcactaatgccagttgttgtttgtatgtgatcaacacttaccgtaaactgtgtgccataaacatcagaattatgtgtgaccataggatttagatccaacttttcagcaattgcattactgattggtgcacaaattaatcctttaccataggtcgccataaaattaacagtgttgtcattcatccattccgtaacagctactaagtcaccttcattttctctattttcatcatctacgactatgatactttcacctttttttagtgcttgcaacgctgtatcgatactatctaattgcatatgagccctccttaaaatccaaatgctttaagtttatctgaagttaatttagcattatcattttcaataattttttcaacgtatttaaataacatatccgtttctaaatgaactggatcaccaacacgcttttgatttaatatcgttgattttcttgtctcaggaatgagatgtatatcgaaatctgattgctttaattgaaatatcgttaaactcacaccatcaactgtaattgaaccttgactaaccatttgttttatcaatgacgttgacggttgtattgttacaattttagaattatccgatgactgaatgcgtttaattttcgctacttcatctacatgaccaagtacaaaatgtccaccaaatcgaccttgaccactcattgctctttctaaattcacttcagaagattgacttaattgatttaaatacgttttattttctgtaccttttataacttgtactgaaaaagtgtgattatcaaattctattactgttaaacatgctccgttaacactgattgaatcaccaatatgcatgtcagttaaaatcgtttgacattcaattttcaagttaactacagactgttgtgttgatatttttttaattgtacctatttcttcaacaattccagtaaacatgtttaatcacttctttcgtaattctaatttaagattttgctcaagcatttgtgaatcaacaatttcaaactgtgggacttctgacaaatcgatgattttatccgtatggaaaaattgatatttgcctgaaccaccaattattttcggggcataatatataattagtttatttgtataattggattgaagaaattcagaagtaactgtgggacctgcttctactaacaatctgcctatacctttttcatataaatttttcataatattttctactgaacaatttgtaagttgaataatttcaacatgttcaatgtccgttactaaagcttcattttgtgtataaatccaaatcggcgtattcgtatttttaaaaatgtctaaattaaaatctatgttaccgttttgggctagtatcactttaattgggtttttaccctcttcaattcgagtcgtatattgtggattatctgcatttaacgtgccactaccagttagtaccgcatcgtgatgatgtcttaatttaaaaacatcttttttcacaagtttattggtaatccatttactttcaccagtatctgtcgcttgtttgccatctaaactacaagaaacctttactgttaccattggtacagattgtcgttttgtaataaagaaatctttatataagttttcagcatcaggttgatgtcgaaattcaacatctatccctgcttcttgtaaaatactgtcaccattggaaggtaatgtagtatctttaactgcataaacaacacgattaatgcctgcctcaataattttattgacgcaaggtggtgtagaaccaaagtgtgtacagggttctaatgaaatataaatggttccacctttcgcattgtcttttgccatatctagcgcctgcacttctgcatgtttgtcacctttttttaagtgtgcacctatacctacgatacgtcctcgattcactactactgcaccaactggagggtttaaacctgtttgtccctcaaccatttgtgcaagttgtatagcatagtttaaatattgactcatctcatcacctctaaataataaaaaaaaaacctgaaatgaacatttcaggtgtgggatctattgatataacattattagcaaaaattagacacacttatacataaattttaaatttatggtatgccaaataaacacttaaaaagtgttgttttgttatacttcattctttctcccatccagactttactgtcggctctagaatctcactagatcagccacatttatacacataaatgcaggtcgcaggcttaatttactgccggttgggaatttcaccctgccccgaaagaatatctatgaaattgttaattgatgattgagtcatgtaactgaaacttagttacaaaatcatcgtactacattttttgagaaatgacaattcttattgcctaagtcggctttatttttctgataattaatacaattacatggagaaatgagtcaaaaaacgaactatttaaagcgtctaatcccatttattaaataatacgttaaacgctcacagatgtttaaagcaacaaaccattagtgatactttaaatcatttatttgattcaaataaatgatttattacacttaccgcttgccttacaatcatcatgacgccatttctcgattgattaataccatttgttaactgacctaatgcatacatatttttaagcgtgccataccttggacttataatttgatttgtttcagctacaatttgtataccaccaagtggatgcgcttgtactacttgtctattttctaaattcaacacaagttgatcatcactatcaagatctgaaagttgtgttttcgaacctgtcgcattaatgactacatcactattttctaccgaaccgtcttgaaattctaattgaaatctatgttgactatgtttaacagattctaagcccttctcaattttaattaagccattattaatgtgttcaatgagtaattgtgcagtctgtggaggcattggattagaattttcttttaaaataccatgataatttgataaaaaatgtttttggtcagtacgactcaaactattccatatccaatttaaattttctttggcaagctcaagtatactttggaatttacctaactcctctgcatgttctaaatcgtaagttaaatctataatcgaatcatttgttcttcgatgcacaagtgtttctaccggaatttcataatgtgcacagtctttcataaataaccgcattgcctcatctaatggcacatttccaaaatgtttctctttaatttcattaaaattttcaggagttaaatatttaaattcaatatcaggcatctcacctctaacactcggtaagtgacccttacgacttgtaaccataattggtaaattaggatgatgcgctgttacatagcgaatcacatcaagacttgctagtccagtaccaataatagaaattctatctgtatctttaacattatctaacgtattatatgtaggatacggtgtttgtatatatcctttcgtgcctttcaatttgtatggatcatgataagacaacgtgcctatagctaagaatactacatcatactgctttcgattttctatattatttgcagtacaaacattatattgtatatctgtttgacctatatctgagtcaataaagacttcagaaacttcttcacaaatttggtgaatattatcatactgattgataaattgttgcaaataatctttcatataatgtccaaaaataaacctcggcaaatacttcggatttgaaaacttaaatgttgattgattttcataccattcataaaattcccgttcattttctaaattcaatgacatctcttcggcaggtaaattaattaataattggtcactatcgttttgaaacggcacaccttgccccatgtttttagggttatcatatacatcgatagctaattcagtaaaacgttcctgtttgactaattcctttagcaaactcacacctgccgtacccattcctatgattgcaatcctcatagttcacatcctaactaaacttatttaagctttattataccaatgatttatcttactttacacattaatggtttacagttgtttcatccgttaagttataatgttttattaaatatgttattctaaatatattgagaaatttatttttttgtattttaaataaggagtataataatgaaatttttaaaacgatttgtcattttggttttatttagcacaatttttttagcaagttgtgaattacctggccttggtggtggacaatcaaaaagcactgtaagaatatctgcattagccacaagtgaatcccagattatggcctatatgttaaaagagttaattgagcacgatactgatgggaaagtaaaaggttcaatcattaataatttaggttccgcaaccattcaacataatgcattaatgaatggtgatgctgatgtatcaagcacacgatatactggtactgatttagtaggtgcacttgaacagaaaccaatcaccgattctaccaaagctatgcatgttacaaaaaaattatttaatcaaaaatttgatcaaacgttttttaattcatatggttttgaaaacacgtttgcctttatggtcacaaaagaaacagccaaaaaatacaacttacatactgtttcagatttagaaaaagtaaaagacaaagtaaatgttggcacagataccacgtggattaaacgcggtggcgacggttatgccccattccaagaacattacggttttgctttcaattctataaaacctatgcaaatcggacttgtttatgatgcattaaaaaaccaaaaactagatgttgcacttggctatactacagatggtagaattgcagcatacgatttagtggttctcaaagacgataaaaacttctttccgccttatgatgccagtgcagtagcgccaaataaacttttagctcaacaaccagaactaaaaaaagcaataaaaaaattagaaggtcaaatcagtacagaacaaatgcaaaaattaaattatgaagctgatggtcaaggtaaagaacctgccattgttgcgaaagaatttttaaaacaacatcattattttgataaaaaatagtattgatttctacctctatatgctttgttattttcaattcacctattatcttaggtacattcaaatatgaattaggaagtgaaataatgaaatttatattcaaagttttcatatctgctttgttattgtttttgcttattggacaaaaaaataaagcacagtaaaacacaaacgcatctaaaaagagcctaagacatctatttatgatatgctcccttcaaagtagacatttaaaaaatgaaaactttgaagggagtttttctatgtctaaaaaaatcgttgatctagatttattagaattgatttttgctaaatatgaaaatggtatgagtttcgaaaatattgtagatgtagttgatattgatatctctccaggccatctccgatacacgtacaacaaatatttaaccaacggtatacaatcttttatacgcaattcacaaaataataagtatacacttcaatttaaaaagaatgtggttcaagagtatttgaatggtggcatatcatataaaaatttagccattaaatataatatttctgctcatgaaactgtacgtagatgggtaaatcgttatactggaagaaaagagaatatcaattcttctcctaaaaatgaggtgtatacgatgaagggtaaaaaaacaacattccaagaacgtcttaaaattgtagaatactatttagataatgaaattaattataaagactgtgctgaaaaatacggtatcagttatggtcaattgtaccaatgggtacaaaatataaagtacatggccgcgatggccttcaagatggtcgaggcaaaggcaaacctaaatctatattaacaccagaagaacagaaagaagctgaaattcaagctctaaaaagtcggaataaaatactagaaatggaaaataaagtactaaaaaaatatcaagaaatagaaagagagatgataaaccaaaaaacaagcaaatcgtcgcatacgaaacgattgaaacgctaaaaaatgaatttcctattaagcatttatgccaaattttaaagatttcccgtgcaagtttttataaatggttacatcgtaatcccacacaaaaagaaattgaaaacccaagtattgttagaagaaataaaacatatttataaaaaatataaaggtatttatggatataggaggatttatatttatattcgcctatattacagaaagaagtaaaccataaacgtgtttatcggttgatgaatcaactgaatttaaaagcagttattcgccgaaaacgtaagcgctataaacctagcaacccacaaaccatagccgaaaacgaattaaatcgtaaatttcaagaaagtaaggctaataaaaaatggctaacagatgtaactgaattacaacttaaaaatggaaataaaatatatcttagtgcgatatatgatttgggatcaggtaaaattgtaagtcatgtattaggaagctcaaataacaatcaactcgtatttgaaacatttgataaggcagttaatactgtaactgataccgaaggtattatatttcatagcgatcgtggttttcagtatacatccagattatttaaaaataagttaaatcaacataatatgatacaaagtatgtctcgagttggaagatgcattgataatggacctatggaaggtgtttgggaattattaaatctgaaatttataggggttataaaaactttaaatttgaaactatagaaccagcgtttcaagttatcaatgagtatataacattctttaataatgaaagaattacattaaaaatggctaatctcgtataaaccgagattaaccgataatttaattatttatttgtctacttgacgggatgcaattcattatgtcttaggctcttttaattattgtttatgtttattatcatctttataaacaaaatatttataatacttaccttctgttttcatatcttcataaaagtgtgccattaatgaagcgttactttctgcccattttatgtcagtagcatattgatgttcacctggatttttcggattccatctcatactatatagtgtattttgatctttatttgataaaaaatgtccatgaataaagttagcaccgccactaattgctttttgtggtgtatcccatccatgttttttggcatattcagaccctgttttaataggatcttcatctaaagcacctacaccgaagaaattatagtattttttaccatcaatctctacgccacttgaaagttcacttttagcagaacctgtttcaagcaatgcgtgtgaaattaagtagacctcatttacatgtttgtctttagcagcctttataaattcatcagaatgcttaagtaatgttgggttatcaattaacatacgtttgattctgttatggtcaataccttgatatttatctaattctaaaaattggtatttttgcgtatcactctcaataaacttactactatccatcgcagcttttatttcagttgatgatgcgtctctccatgttttgttatctttacttgaaacttgttggcttgtgtagttatctatttgctttttagatgctttatctaaagttacttttaaattatcaactttttcttgttcatctacttctttaaaaaagatttgatctgaaatcattgaaaatacaataattgcagctacacctaagattaccaataaacctataattgataaaattgagccttttttatgcttcgtcatgttccacacctcttaggtaataattagaaatgagaagtctctatcatttatgtatcaatgcgcttgagactatctgataataaattctaacactaaatagttaaacgcacaattttatctaagtgttgttacatattcataaaaaaagtaatgaaattttaatttcattactcttgacttttacgatattccattatgataaagctcgatgcttgtgatctatttttataataataacgattcaaatcaatcgtaccttcaatttctccatcacgatacatcatttcatttgttaagttatttatcattacaaaatctgatttatctttaatcatatctaaatcattatgtttagcaaaaaaatgctctaaatttaaatgtgcgtaatccatataaacctcctgataattgtccgaagataataatacatcttttagtgttatatctctaagttgaatacgcgttcatgttataaaaactaaaatttattactcttatattatctatttaacacctattatgtatatttagcaaatgaaatttattatttgtctttataaaatgaatttatccggaattacaagttgtatatacagcaataggaggcaccaaatgcactttagtaaaatttataataaatcaaaacacatcatatatgttcttctaaaaaaatacaatattaagtacaataatgatgaatttgtacaattactcacgattaaattatgggaactatccagaaagtataatgcccaaaaatcttcttcatttcaatcttatttatatacacggttaaatttctatttaattgatttatttcgtaagcaacacaacacttatgaaatatgcgaaccatttgatgaagtaagttgtcatcaaattcctagcatctaccttgatagtaaaatagaggctcatcatttcttaacaacgcttacaacacaagaacaacagtggttacaattaaaattatatggttataaacaaaaagagattgcacaacacctaaagtgttcaatatcaactataaaaaatatacagcaacgtgttcaagtaaaatattctaaatactataaattttaatgaggtgaatttaatgaataaccttgctaaactattatatttcaaaaccgttatcggtcccgaattacttaccatttgtcaatatacaacacatcaatttacgtatccttcttccattaatcaaacattaaaatatatccttgaaaccaacaatctttctttacccatacaaattaagcaagctaaggacatacttaaaatacgaaaactcatccccatctatattaataaccatacgatcgtcttcccaattaaagcaaagcgctccccaatacaatattttatcaatgcattagcaattaatggcttaaaatcacaaggtgcacaaacagttatttattttgataatgcaacttttatcatagttgatgtagcatatatcgttgtacataaaaaatggcaagaaagtttaacactttctcacctaatagatagttagtattttattacaatgctttgttatgcttatattttaataattttttcgtaaagtaaccagtgaccaacctaattaaatacaaactaacaataacaagtaataatgctccaataaatgttaatatgactgtcagtgtcgataactgtacttctggttttataaaatattgtacagcagttaaacttgtaataaaaccaaacaagaaaatacctaataacataatatatgtaaataaaatacctaataataaagcaaataactgcgtagacgatactactttttctttaaaaacatattcttttaaaaattgattagaaaatgcaataggtcgatttaaatgttcattatcatgcttttcaactacgctttccaaaacagaatccaatttacttttttcttttttatttaaaaaccataactgctttttaactttttgcttaaaaatatttgctttcatttaatatgtactcctttagcaatttcgccatacatctctttcaaatagtaatggaattatctcaatgaatcaattataattgaacacattttttacaaattatgcatcaacgacatctagtcccactaatgtagcgaattgaattgcttgttctttagataccttacacccaactaaatctttttattgacgacaattgtttcaaattgtgatgtgcttaaatcacaaccttttaatggcgtttgatgtattgttacgtggttcatgtttgtttcatcgaatgtaatttgttttaatgttgattcataaaaagcaccatgttcaagttgacacgtatcaaatagtaacttatccattttagagtctataaaactaacaaaattagctttaacttcacaaaatgaagtatgacccaatctcatttgttttaaataagtccctgtcatacgacaatttttaaatatcactctatgtaaactaccatgttccattttaacattagaaaaatcacaattttcaaaaatcacgtctgtaaaatctacacgtcctaaatcagaattagtaaagttgcaatttgtgatgcgtgaaccatatatcaataacctatctaaagtttgatcaaccaaatttgaatgattaatagctgcttgctctaaaatatcgtcttcatcatcaaaaacatcagtaagtattttataatctaaactaacatttattttgggctgttggagtttcattattgtatctcctgttcaatcaatctatttcactatatattagcaaatacgtaggtgctctgtacatgacttaatatataatttaacatttatgtataagtataatgggcttgttaatgacttaactattttttaacaaaaaaattgagtctgaaacatctattgatgtctcagactctttttcaattgaatagtagacgtaaggtaccattttcaatataaaactacattcatattttacatgaacttgtcgtcactatgaataagttttagctcaggtaaacctctatcatcccatccataataaagtgggcgtacgtaatctttattgtaaaattcgtttgttatcccactcataattaaatttattctaaagttttatagaatagataaaccagaactttggatgtctttagcaaatccttgtacagtgtctactgataattcaccaatatcacgaccaagattattatttacttttttaacaacatctgctggacatgtgataatatctgcaccgacttcgtctgcttgaatgacattaatcacttcacgacagcttgcccatagtaatttaacgccttctttactatgcgttacttctgctgcttctttcatcaatggaataggatctacacctgtgtcagcaatacgaccagcgaaaactgatacataagttggtacgccttctgttacagcatcagtaatttctttaacttggtctaaagtataaacagcagttacatttaaacgaacgttttctgctgataattttttaattagagaaattgttgattcacctttagtgtttacaactggaattttaacgaatacattgtcaccatattgttttaaaatttcagcctcttttgccatagtttctaaatcatctgcgaatacttcaaatgaaatagaagcatcaggaatttcacgtacagcttcttcagcaaaagctttatagtctgttacacccgcttttgccattaaactagggttagttgtgaaaccatcaacctgtttgtttttataagctgctttcatttcttcaatatctgcaccatctgcaaacacttcaacatttaaatttgccattactaattcctcctgacttaaataaataattcaattaagaattattttctaacggttattaaccatacagtttatttataccatcaatattagaaaaattctaattttttgcttaaaatcttatcattcaatacatcttcataatcaattcacatcagtcaacgatttaatttgacgcactttttaaaactcaaatatcagaaaataatataaaatagtaaatttcattaaatattcttatatttatggtatcattgtaaaatgaattgcactaggaggtaaatatggcacgttcaaaactttatttttatttatctagtttattagtaattataagtctttattttaatactagaaatcctctactaagcacacattttagttcaatgattaaattaatatttgtgtgtagtatcattaacgctattattttaattatttcaattatatttgcagataaagctatcaaacatttacataatgattcagattggattagaatagccagcaaaatcttgccatacattattttggtggtattaatcattcatatcattgcttccctatcaacgtttggtattattttctagtttatagtaaggatgagatgtagaatggtattttaaattttactcaaaaatttcatctaccaactttagtaatagtgaaatataaaaccatattatatgttttaacacgtaaaacattaatttttatcaacttctaccaatatgattgacgaaactggggcattttttaattatgttccagtttttaaatttaaggaaggacatacattaatatgcaatatttatttatttttctaggtggtgctgtcggtgcattactaagatatttactttcatttataaatacatcttttgaaatgcctattggcacatttattgcaaatttatgcggtgcatttttgatggggtttcttggcactctagctatccaatactttaataatagcccaatgctcaaaaaaggtatcacaacaggctttataggatcactgactaccttctcgacgtttcaatttgaacttgtacaattttttgaaagcggctcttttattttactcattgtatatgcattaacgagttacatctttggtatcttactatgcttcttgggtgttagattgggggctaaaatttcatgattcaatgtatattagttatgctaggcggcggcattggtgcggtaattagaggattcgtcacagatgtatttaatcagaaatttaatacttcccttcctatacctacacttttagtaaatgtagtaggcagtttttgtatcggactacttatgggtatgtgtttaaatataaattggattaatccttttattatcgtaggcatactgggtggattaactacattttcaactttgtcttccgaactcgttaaattattgacaacaccgaaacaaatcaatttatttatactttattctattttacaatatggcgtttcattcgtagcctgcttgttgggttactatcttttttaaatcttcttagcaacatactagataatcttccatccataaataaaacagtctgagacctttaatgatgtctcagactgtttttgattatgatgtaagtataaagcaacacactttatacttaaacatcgattcatgtattccaattaaagtagcaggacttatacctaaacttcagtcaaagtagccctctatactacaatccatgtttagtggagctaagtcatctttattaaaaaatcggtttccaccttatttttttatttcatcgacttagtgaccattgtaccctattggatctggtccaatccttttatcttcattcaggctatctaatttttcaatttgagttggtgttaaattaaaatcaaagacattcaaattttcttcaattctagacggtgtaacagattttggtatcactactacaccgtgttcaatattccatcttataatgacttgtgctggtgattttccaacttcttctgctactgatttaacggttgcatcctctaagatttgtgcattcattaatggtgaccacgattccatatgaatattttgtacttctaaatatcttcttagtgattcttgtaacaagtatgggtgaaattcaacttgattaatgactggttttatagaaacctgtgccaataatgcttctaaatgttcaacattaaagttactcacaccaatatttttcactttattatctttatataaatcttccatcccttgccaagtgtcaatcattaaagcttcatcagtacctggccaatgcattaaatacaaatcaagataatctaagttaagtttttttagactcgtttcatatgcagtttcaacatttttgcgaccataatcatctaaccacaattttgatgtaataaacaaatcacttcttttcagtcctgtagaagcaagaccttccgcaataccttcgccaactttgtgttcattttcataaatcatggctgtatcgatatgtgtataaccactctcaatcgcatgtttaaccgacgctttacactcatcgttattttcaacacggaacgttcctaaacctactataggcatttcattgccattataaaaactaatattttccaagttaaagtccccttttagttaagttaatgtttatattaatgaatattaccaaaaatataaataataatgcttataaatttaaaaagtcgaaatattattatatatgacaaaaagctacagacaaaagtgaactgactttgtctgtagcttttttatatctcataatattctaattaaatgattcgatttcatccattacacgttgtaagtcttcaacattgtattgaatgcgaccatgaaagacaaatttattaaagaattcgtctaattgttctggtcctactaaaacttttgaatttgaactttgtgcataatttgtaatcgtaacatcgccatcatttttagggttgaagtataagatagttgttggtgtaaattttaaatttaattctgtttggatatcaccagcaagtctttcaatttcatctaaatgcgtcgtgtaattaacaaatgataaagcatctttatcttcattttgatctaagacaagtgtttgtggaacttgaccatcaagatctaatgtattaaatacttgttccatcatcggctgttctttaaattgtgcagcacttacgccattatacacatgacctttaagcaattgtgaatcaatgatatataaacctgtacgtgttaggactaagtgactgatacgttgcacatcaccaaactcattccttggtaaaaaaatatttgccataatatgcatatcttctggacgaattcttttctcatttacaagtcgttcgcgaatacctattaatctcatatcagttacatattcactttgatttttagagaataattttaatgcatcaatttctctatctttagaattaaccacagccgtatattcttctttttgttttgttaccgtttttttattttcaattctttctttttctagctcttcttcatgctcatcgctcagttgttgctctcttgatttatattgcgcttcaactttttcttgcgcttttttcttactttttaaagcaacaataaataaaatcaaacaaatgactgctacgacaattgccacgattaaaccaatctctattggtccaaatgaattcataacaaaaacgctcctttatgtgttcagtaacttaattataatagatatgcgcatcgtattcgatagtaaagtttaaaatttaaacattttgtctcagtttaagctttgacactatcttttaataagttaactttatctaatttttcccatggtaatagcacatcagtacgtccaaaatgaccatatgcagctgtttgtttataaattggatgttttaaatcaagcattttaataattccggcaggtcttaaatcaaaatgttttcttacagcttctactaattcatattcactgactttaccagtaccaaatgtatctattgaaattgaaaccggttcagcaacaccaatcgcatacgctaattgtacttcacatttttcagccaattgagctgcaacaatatttttagctacataacgtgcagcatatgcagctgagcggtcaactttagttggatccttaccactgaagcatccaccaccatgacgtgcatatccaccatatgtgtccacgatgattttacgacctgttagtcctgcatctccttgaggaccgccgattacaaatctaccagttgggttaatataaaatttcgtctgttcatctaataatgactctggcactgttggataaataacgtgtgttttaatatcatctttaatttgatccaattcaatatcttcagcatgttgtgtagataaaacaatagtatctattcgaactggtttatcttgttcatcatattcaactgtcacttgaacttttccatcaggacgcaagtattttaaaatttcatctttacgtacgtcagataaacgtttagctaactgatgtgataagaaaatgggtaacggcatatacgtatctgtttcattagttgcataaccaaacatcaagccttgatctcctgcacccgtagcttcaatttccgcttcagaagcttcgtcgcgatattctaaagctgtatctacaccttgtgcgatgtcaggagattgttcgtcaattgctgttaatacagccatcgtttggctgtcgtaaccgaatttcgcacgtgtgtaacctatttctttaattgtttctctaactacttttggtatatcaacataagttgttgttgaaatttctcctgaaattaaagccatacctgtggttacagtcgtttcacaagccacacgtgcatttgggtcatcttttaaaatttcatctaaaatcgcatccgatacttgatcagcaatcttgtccggatgcccttctgttacagattctgaagtaaacaatcttttattatatgtcataatttgctcctttagttttaaattacgaaaattctctctctgttgagctcattaaaaaaggccttctacactatagtaaatagagagaaggccctttatacgtccattcgctcttatcgttcagacgctatttgtctgcaaacggtttggcacctttcttcaattaagaagaggttgctgggcttcattgggtccatgtccctccgccactcaggataagagaatccgttaatttatatagtacctaatctaacatataatgtcaattttacatttattaatatttatttaaaattcctttgaaattggtgtggactattaatctatatatgttatactctgtaattgtaaaggcttacatcaactaaatagcgtggagggatcaagtatggcggtagatacatacacttatacaagcaaaattgaaagcattttagacaagcaatcttcattatttcaattatctacaactcagttgtataataaaattttagaaaataatgaaggcgaactaacggaattaggcgccatcaatgcaaaaactggtaaatatactggtcgttcaccaaaagataagtttattgtcactgagccatcttatagagatgacatcgattggggcaacataaaccaacctatcgaagaagaaaaatttctaaatttatatgataaagtattaaactatcttgataagaaagatgagctttatgtttttaacggttatgcaggtagcgatgaagattcacagttaaaactcactgttgttaatgaattggcttggcataatttgttcgctcaaaacatgttcatccgtccaagtacaaatgaagaagctcaagaaatcaaaccaaacttcactattatttctgcacctcacttcaaagcagacccatccatagatggtacaaattcagaaaccttcattatcacatcatttaaacataaagtaatcctaataggtggaactgaatatgctggtgaaatgaaaaaaggaatcttctccgtaataaactacttactacctaaagacgacattatgagtatgcattgttcagcaaatgttggcgaaaaaggcgacgtagctctattctttggtttatcaggtactggaaagacaacactttctgctgaccctacacgtaaactcatcggtgatgatgagcatggatggaataataacggtatcttcaacatcgaaggtggctgttacgcaaaagcaattaatctatcacagaaaaaagaaccacaaatttatgatgctattaaatacggaacaattctagaaaacgttgttgttgatgaagaaggcgatgttgattttgacgacaatcaatacacggaaaatactagagctgcataccctattcaccacattgataatattgtgacaccatctaaagcagcgcatcctaatacaattattttcttaactgcagatgcatttggtgtattaccacctatttcaaaattaaccaaagaccaagcgatgtatcattttttaagtggtttcactgctaaattagctggaacagaacgaggcgttactgagcctgaaccatcattctctacttgttttggttccccattcttaccattaaacgctaaagtttatgctgatttattaggtaacttaatagataaacatggcgttgatgtttacttagttaacacgggttggactggcggaaagtatggcgttggacgtcgtattagcctaaattatacaagacaaatggttaatcaagccattacaggtaaattgagagatgcagaatatgtgaaagatgatatgttcggattagatattcctgttgaagtagaagatgtccctcaaacattgctcaatcctatcaatgcttggagtaagccagaagcatacagaacacaagctcaagatttaattaatcgttttaaatctaattttgaaaaatttggagaagatgttgacgaattagccgtcaatggcggatttgaataatttaaaatattagaaaagtagccatgtagtcgtctattacaatagaaaactacatggctactttttatttgtaaatactttatatctataacatcttatctatcatattggtctttaagcttgttctgttcaacatcatccatccactgtttaatttccagtagcgtatctttgagcgcaaatggtcttggtacgtgtccctccgacatttggtaataagtacgaaatgtcgcaccaatcttttcaagttgttccactaaatagtaagcattatgaatacttacttgtttatccttacccccatgaactataaatatgggcgggcttgtgtttttaatttgagcgatagcatcacgtcgtttataagcttctatattctttttaggatgtccaatcatacgtttaagcattccccttaaatcaatgcgttcttcatacatcagatttatgtctgagacaccgccccaaataatataactcgtcaccggtaaatcttgaaatgttaataaaccttgaagtccacctctagaaaaaccaatcatgtgaatgggaataccaggatacttttgatgtaacaaacgtatcgcaactgtaacgtcatgcagatccgaaccataaaactcatctttgccttcgctaccattattacctctataataaggtccaaagaccaatgtatgttcatccgcaaattgcatcaatcttcccgttctcaccttacctacttgccctttaccacctcgtaaatatagaacaattctctgcacttttgcatgaggtgtcatcagcagccccttaacatttaaatgatctactctatagattacttcatcaaatatatggctatttgattcaaccggcattctctttttatgaataaaatccaagttcaatcactctctctaaacattgtaatattgctggatctttcaataagtaactttttttatcttctggaatctcagataatgatttatacaatagtggtccatccgtttcaaaataatctggttgctcagtgatagcttctatctccaccataaagacatctttagtaaaggacattccaatttgacgatcaaccttatattgcgctatgtattcacagtatttaatcgttgcgccagtttcttcaaagacttctcgtgctgcagcagtttcactcgcctcacctttttctcttttaccacccggaaattcaataccacgtattttatgttttgtgaataacaagctacccttatatttagggattataagtacatgattaccgttggcataatctactttctttttaaatgttaggtacacatcgtcattttctttgtctttaaacttcacatacatcactcttccccttattatgttaaactagctatgctaagatttttgttggaggcaaaattatgaaaactatatttctaggacttatccatatatatcaacgctttatatcaccattaacccctgcaacttgtcgtttttatccaacctgttctgaatatactagagaagccatagtagtgtatggtcccttcaaaggcacatggttaggtattaaaagaatttcaaaatgtcacccgcttcataaaggtggctttgatcccgtaccgctaaagaaaacaaagcataaaaaagataaaaacattaacaaataaaattcaatatcttatgatttaccactggaggctcaaaataaattgagcctccttttaatatacctgcctgattaatcatatctaccttgtagtaataaccttctggtgtaatatcactaggataatcagcatattgtgctaacatcgctgtaaaatacctacttaggccatattcatacataccacctatcacgattttcacatctagagtattgagcatttttatcaaatccatcactttatctatgccacccaatctaaatggttttaacacaacgacctcaatgccaaaatcattaatagcttgtgaaataagtgatttagatgtcgctttctcgtcaatcgcaacgggtggtagttcatttttttcaaaatgtgttaaatgttgtagtgacttaaaaggttcctcaatatataatatttgcgcttcacttagtgtttttaatttatcataatctactttgcttaatgattcattcgcatcgatggctatatcaggtcgaaaagctaattgtgacaccttttccacatcatctaagatatcagcattccatttaagctttacgcgttgcggttgcgtttgaacaagttgttgaaaatttcttgaagtcatgccattaactgtcgcgccataaggcacattcaatgattctaaaacatgaaacatttgataacaagccatcaccaacatgctacgtgttgcaggataattagataattgcgttaatgcatcttgaatttctaaaaaagaatgaaacgttttaccctgaacctgttgaaaccatagttttgaaaaatgttttacatcctctattgtttcatttgcataccaattcgtttcaaacgcattgctttcaccaaaatatgatttacctttatctgttattaattcaacgaaaagcgctttgcgcgtattcattttaactttaggggtaatgacaggtgttttaaattttgcattataatcatacaaatgcatgttaactattttcatatgtactccttagttaagattataaacgcgttctttgaagtttaccagttgacgtgtaaggtaaacgagatactcgttgaaattgtttaggtactttatattttgcaagtttttctttaaaaaacacagttaattgttcttctgcgatatctttatttgcaacataatatagataaggtactgaaccccaagtatcgtcctcaacaccgatacacatagcatcttcgatattagggaattgtttggctacagattctatttcaaatgggtatatgttttcaccaccgctaataattaaatcttttctacgatcgtatatcatgacgtagccttcctcatctatttccgctatatcaccagttttaaaataaccgtcttcgaatgtatccatttttactttaggaaaaagataaccatccattacatttttacctttaatcaatagttctccatgtccatctatattaggtgatttaattttaacttcaacatcattactcggtttgccaacagtatcaaatcgatgttcaagcatttcaggtgtcgccgttaaaaattgcgagcatgtctctgtcatgccaaacgaattatatattggtaaatcatagcttaaagcttgttcaattaagttacgagaaagcttagccccacctaacagtattttctcaatatagaatggacggtgtaatccagcatccattaaccattttaatgtttgtggcaccagcgatacatgcgttggcgcttcattttttatgatatttaacatttgctccgtattaaattttgattctaaccgtaatgtgaagccttcaattaatgaacgtaatacgacacttaatcctgaaatatgatatatcggtaacacagataaccattttgttttctcattaaaacccaagctttctcgacatccaagagcactcgccaaatgattattgaatgtttgcggcactgctttttgtgaaactgtagtaccggatgtaaacataatagatgcta

SEQ ID NO: 20 - DNA, 1029 bp, Staphylococcus saprophyticus
gataaattccatgcatccgaaagtatgggtggcttagctgccggtatctttatcatcggtatgcttttcggtcgtttagcatctgggcgcgtaattgacaatctacaacctaaaaaagtattgctattcggcattatcttttcaattattaccgttggcttatatttccttattagcagtctatttttattaatgcttgtgcgcctattacatgggatagcatttggtttggcttcgacagcaactggaacaatttcatcaagaattattcctgaaaaacgtaaaggtgagggcatcggttattacgccctcagtgttaccacagcatcagcaattggtcctttttgtggcattgtattgaaccaacgattcggtttcgaatctattttcattgttagtttggttatcatcatcattgcgttcattgccgcactatttattaaaggattaccaaaaccacctgttgagaacaacgatgaagcagaaaataaaggcattcgtgcatacattcaaaaagaagcactacctatttcatttgtcgttatattcgtcggcattgcttattcaagcgtattgtctttcttaactgtttatacggaacaaataaatttagcgactgcatctagtttcttctttattgtttatgcagtcagcacctttgttacacgtccatttacaggaaaaatttatgatgcctatggtgaaaataaagtcatgtaccctgtgttatgtagctttgcaattggcttagtactgttagcaatctcacacacaagtctattgttacttatttcagctatatttgtaggtatcggttatggaacgattgtcccaagtgcgcaagccattgccattcaacaatcacctgttgataaaattggtttagcaacctcaacattctacatgtttgctgactttggcgctggtattggtccattcgtattaggtatcatggtgccaatcatgggatatcgttatctatatatcacgatggctattgtagtcattgcatccattatcctttactac

SEQ ID NO: 21 - DNA, 25880 bp, Staphylococcus saprophyticus
aattatcctccgcgtcatcaaaaagtagtttatgcgggaccgattgttcgtgataaccatgtctatacgcaattgggtatcgaacattacaaccctaccataacggatatgcaagaagattttatgacgttttataaatatatacaacaatatcttaatgacgatatcgattttgtcattttaggacattatcaacttatcgatttactgttaactactaaagaacaaacaacaacgattttaaaattagtacaagagcgtaatatttcagaactttcatccgaacttggcacttctcatccgcttgttcaattattgacaacaaaaacaacgaatcaattagatttacttagtcaactctttccttacgatcatcgtacaatacaagctttgcgccgttgggaacagtggtttaagtcattaaatgtaaaagatatacatttagatatcacaccacaaccgcctcgttcatattacaaaggtgcatttttaaaatgttatctaaaaaatgataaaaaccaccaacttactggaggtttctacaaaggtgaattagatggttttggattaggttttatattataaataaaaggagttcttattatgcttacagtagctatagccaaaggtcgattattaaaaagctttattacttatttaaaacaagctaatgaacaagaactagtagatgcattagaaaaacgagaacgtcaattattaatttctgtaggatctattcaaatcgtattagttaaaggtagcgatgtccctatttatgtagaacaaggtgtagctgatgtcgggattgttggtagtgatattttagaagaaggaaattatacaattaataatttggtagatttaccatttggagattgtcattttgctttagctgctaaaccagaaacttcttctttcaataaaattgctacgtcgtatgtaaaaactgcacgtgcctacttcgaagcacaaggtatagatgtagaattggtaaaactatcaggttctattgaattagcttgtctcgtagaaatggtggatggaatagtagatattgtgcagactggtacaacactaaaatcaaatggcttagttgaaaaagatacgattaaacccattaacgcgaaacttatcacaaataagcaatcctattttaaaaaatcatctgaaattgatgcttttttatcaacactggaggtgtcactcattgatcatagataaaacgctatttttgaaaaagtatttaaaccaatcttccttaaatgaagacctataccccatcgtaaaggatatttgcgaaaacgtcagacttcacggagatgatgccctcagaaattataatcaacagtttgatcaggtagagacttgcaatttagaagtcgcttaccaaactttagaaaatgcctataatcgcctagacagtgatttacgtgaggccttacaacaaagtcacgcgcgtattcaatcttaccaagaatccattaaatgtactaagcaacaaggcacatcagattgttatgaattgtaccatcctttagaacgcgttggcgtatatgtaccaggtggtaaagccagttacccatcaaccgtcttaatgacagtaacactggcaaaggtagctggtgtaaaaaatatatctgtagtcacgcccccacaactaaatggtataccagatatcgtattagccgcctgttatatcgcaggtgtcgataacgtttatcaagttggaggtgctcaaagtattgctgccctagcttacggtacagaaacattgccaaaagttgataaaattgtaggacctggtaaccaatttgttgcctatgctaagaaatacctctttggtcaagtaggaattgatcaaatcgcgggccctagtgaaattgcattaattattgatgactctgctgatttagacgccatcgcatatgatgtatttgcacaagcagagcacgatgaacttgcaagaacttttgtcattagtgaagatgaagcattattaaaacaacttgaacaaaaaatacagcacatacttcctcaaattgaacgtcaatcaatcgttcaagcaagtttaaatgataaccattttttgatacatgtgaataactttagcgaagcgtgtgatttaatgaatcaaattgcacccgaacatgcttcaatacaaacagtttcgccacatgattatctaaatcatgtccgttacgtcggcgcactattcttaggttattattcacccgaagttattggtgactatgtcgctggcccaagtcacgtactgccaaccaatcaaacagctcgatttaccaatggtctatctgttaatgattttttaacacgtcattcagtgatagatttatcaaaagatacattcgataccgtagaactgactgcgcgtaaattagcccatgttgaacaattatataatcacgaacaatccatagaaattagaacatcaaaggagtttaacgatgataagaattaacaaaaatgaaagcccacttcgccctttaacagaagcacaactcacatcgattatacatcatgcttcatttaacttttatccagatgaagaatatgaacgatttaaggcaggttatgcgcgttattataatctatcaccagaccaaattattgcaggtaatggttctgatgaattaattcaaaaattaatgcttatcatgccagaaggtccagcattagcacttaatccagatttctttatgtaccaagcctatgccgaccaagttcatcgaccaatagcgtttgtaaatgcagataacgacttaacatttaatctagaaaatatattaagtcgcattgaagcagtgcaacccgcattctttattatgagtaatccacacaatccatctggcaagcagtataatctaacatttttaactgcaattgcagataaaatgaaaaatattggtggttattttgttattgatgaagcttatttagattttggggatgcctacacgcttgaattgcaaccacatgttcttcaaatgcgtaccctttcaaaggcatttggtattgccggtttacgtttaggcgtgttaattggaacacctgagacgattcaacttatacaaagtattgaacatccttatccattaaacacactcactttacacattgcacttttcatgtttgaacatattgataagacacgcacattcattgaacatcagcgtgcattagctgttagattaagacaaatgttccaagataatgttagcgatataatgaaagtcttcccttcatcaactaactttgtcttaacaaaaggatccgcagcgcaaagtcttggcctttatattgaagatcatggcttcttacctagacgttatgacgaaccaaacatgaacgattatgtaagatattccatcgccacagacgaccagttagaccaattagaacagctcattaaatcatggaggtcacaatatgatatttcaaaagaaacgtaagactgcagaaacagagttatcaatcattttagccgatgacaaacgaacaagtgaaattaacacaggggttggtttcctaaatcatatgctcacactctttacgtttcatagtgggctgtcaattataattgaagcaaatggagataccgaagtagatgatcatcacgtaacagaagatattggcatcgtactaggtcagctattattagacatgattcgagaacgcaaatctttccaaagatatggtgtgagttacatccctatggatgaaactttatctcgtgctgtagttgatattagtggacgcccttatttatcgtttaatgccactttgagtaaagaaaaagtaggcacatttgatagcgaattggttgaagagttcttccgtgctttgatcatcaatgcacgtttaactacgcatattgatctacttagaggcggcaatacgcatcatgaaattgaagccatatttaaatcatttgcccgtgcattaaaaatggcactttcagaaaatgataatgataacatcccttcatctaagggtgtgattgagtgattgcgatcattgactacggattaggtaatgtaaaaaatgttcaacgcgcagttcagtatttaggatacgatgcgatattgaccgataagtataacgaaattgcaaatgctgatgtcgtcatcttacccggtgtaggtcactttaaagatgccatgcaagcaattaacgagcgcggtttagcaaatataatcacatccattacggataaaccagtgattggtatctgtctcggtatgcaactattttatcgttggagtgcagagggtgatgtcgaagggttaaatattttcccgggaaatataattccaatacagtccccttatcctgtaccgcatttaggatggaataatctaataagtaaacatcctttattattacatgatgtttactttgtccatgcgtatcaagctgaaatgtcacaacatgtggttgcttacacagaatacggcacaaaaatcccagcaattgtgcaatatcaaaattatatcggcattcaattccatccagaaaaaagtggtgatgatggattagcaatacttaatcaagcactgaaaggcggatttcaagatgatcaaactatggccagcaattgatttaatcaatgctactagcgtgcgacttactgaaggtaaatacgattcagaagttaaaatggcgcgtagcgcagaagaaagtgtacttttctacaatcagtatcagtgtgtagaccgaattcatatcgtcgatttaattggtgcaaaaaatcaagtatccatcgagagtgactatatcaatcaattacgctcactgactgataaacctatggaagttggcggtggtattagagatagaaataccattgacacttactttaataatggtattgattattgtatcatcggcaccaaaggtatcgaagatttagcgtggttatcgcacatgacacaagcatttccaaatcgtttatatctatccattgacgcttaccgtcgacaagtcaaaattaatggctgggaagaagatgctggcctcgatatctttgatttattacaacaagtagaatctctcccactcggtggtatcatttacacagatatttctaaagatggcaaactcgagggccctaatttcgaaatcacacaacaattagttcaagcaactcaaaaaccaattattgcttctggtggtattcgtcatcaacaagatttagcccaattagaatccattggcgttcatgcagccattgttggcaaagctgcacacaacactaccttctgggagggattgtcatgattaaaaaacgcattattccatgcttagatgtcaaagatggtcgcgtcgtcaaaggcattcaatttaaaggcttgcgtgatattggcaaccctgtagattttgcactttattataatgaacaaggtgctgatgaacttgttttcttagacatttcacgtacagaagctggacatgatcttgtacttgatgttatttcggaaacagcagaaaaacttttcattccattgacagttggcggtggtatttcaaccattgacgatatctctcaattgttaaaccacggtgcagataaagtatccttaaattcaagtgcacttaaaaatccaagttttataaaggaagccagcgaaaaatttggacgacaatgtatatgtatcgccatagatagcaattacgatagcgaactaaatgattatttttgttacacacacggtggtaaacagcgaacggataaacgcgtttatgattgggttcaagaagttgaagccctaggcgccggtgaacttctcattacaagtatgacgcacgatggtatgaaacaaggttttgatgtctcacacttacatgaaattgaaaaacttgtgaatattcccgttatcgcttctggtggtggcggaaatcctgaacatttcgttgacttgtttaaagaaacaaacgtttcagcgggacttgcggcaagcatattacacgataaagaaacaactgtgaatcaaattaaatcatcaataaaacgaggaggtattccagtaagatgactactcaagagcctgattttgacaaaggacttattcctgttgtattacaagatgtacgtaacaagcaagtacttatgctaggatatatgaatgaaactgcctatcaaaaaacactcactgaggggattgttacattttactctcgctcaaaagaacgtttatggactaaaggtgaaacttcaggtcacacacaaatagtgaaacatatccatctggattgtgatcaagatacattgcttattgaagtacttccaaacggaccaacctgtcatacaggtagtcaaagttgttttaatacgtccgtaccttttaatgtgcaacaacttgaacaaacagttgcagcaagtgcgcaggcagataaaagtaattcgtatactcaatatttattaaaagaaggacttgaaaaaataactaaaaaatttggtgaggaagcatttgaggtggtgattggtgcaatgaaaggcgacgttgaagaggtgacgaatgaaaccgccgatgttatgtatcacctttttgtattattacatgctttaaatattaaatttgaagatgttgaaaaagtactagcaaaacgtcatcaaacagccaataattttaaaggcgaacgaagtgatattgattactggtaagcgtcaaaataaactaagcacgtcatagatatcaaattatataaattcgatgactatgacgtgcttagtttttacttatgctttaaaagttcttttttaaatagttcagcttgtttctctactgaaattaaatctgcataaattgcttcatccatagaataataaataacattaccgttttgaacagctttattatttttccaagtatttgatttcacaaaatcattattcggtttcttaccatctttagtaggaaggagtaaataatctcccgaatacgtattgaatttctcttttggaactttcataaacttctcttttggcattgcttgcttagcttctgggtcctctttcaacttaaacccttcatatatagcttcacttccgcggccgaatctagggccaaattgataaatatcttttgcttgaatatccataattgaaaaagtattatctttaccaattgctttcttaatttctttaccatctttagctagtttttctgatagtttatcagcttgttttttagctttagcttctttgtttactaatttcccaatttcaatatgtgtatctttatagtccatatcctgtactttaataggtactgtcagtgcaattttagctaattttttattattcttgttctctttatatgtaataattaaatctggttttaattttgccgccgcttcaacattttcaggatcaatttttttaaccttactcatatctaaatatttagaatctggaaatacatttgtgatagcgacaggtttaacacctaattttttaaagtttccataattagcggttaacacaagtactctttttggatttttaggtatttttactttactaccatcatctgtagtataagtctttgtacctttgtcatcttttgactctgaatttttcgaaccattaccgcaagctgctaaaaacaataactaacataacatcaagcataaaatttttttcaaaacgataacctcttctcttgtttattactaccattttaatcgaaaacgattatcaattgcaatagaataaaatgaacttttaaaataattagttgcttctaatttataaaaaaataatttaccaaatacttttatagttatatttttgctattatatattaaaggagttgttatttatattcaatcaatttttaggtattgatcatgttcagttagctgcaccacctcacaatgaatcgttagcaaaggctttttattctgataaattaggttttaaagaaatagcaaaaccctccaatctcgcgaaaaatggtggcgtttggtttcaagttggtgaccaacaactacatattggtgttcaagatgactttaaaccagcaacaaaggcccacccagcctttttagtacagaacgcttcagatatacggaaagaacttgaagctaaagaaattgaaatcatctatggtgatgaacttgaaggcgccaatcgtttttatatctatgacccatttggtaacagaattgaaattataggatggttatgatatttcaaactaaaaaaccagaacgagacataatggtgactcgccctggtttttttatgtgcacccatgagttgaatacgtgttatttataacaactacacttcaagatacattaagtcttcatcataatacctatgaccatcaaagattgatttaggttccctaccataacgcttaaaccctaatttttcatacaaacgaatggcttgtgtattctcagataatacacataagccaatgattttcacaacaccaaccacactaacatcgttaatgatatgttgtatcatttgagctgtaataccttgacctctatatcggggatcacaatagacagtcactaagttacctttatgttttaccttttccattctctcactataaaatgtagcgatacaaataagctccccactatcaaacgtgcctatcgtaaaatgcgtatcatttaatttaagccgtgctttaaattcatcttccggcaatgatttttcacgttcatatgttgatacaaatccctttggatccgtctgtaacgattttaatcgaatggctcggtactgttttacatctctttcggtaaggtatcgcatttccatttttctcacttctttcacgaatacattcaagctaaactattagtaagatgaacaaaatcaaaaagtcctgataaaaatttcatagtcttcgctcttattaaataacgcgttaaatgaatctcatttgcgtaatacatgagctagcgtttttatatttgtaacttagcatgtagattacagtccatataaattaatttggccgagacacttcttattgatgtcccggccttctaatatttcatttatgtttaaacaggtctcactgtcacttcattcacattgacatggcttggttgctgtaatgcataaattgctgcttctgcaatatctttaggatctaattttttgcgtgctccccaatctgtatctccacttaatggtgtatcaaccatcccaggagaaatacttgtcacacgtacgcctgttttcgctaattctttttctagaccttgtgtaatactgtgtacagctgctttggatgcactataaagcgtgctttttttagtaacttcaaatccagaaattgaggcaatattgataatgtgaccactagactgatttagcatagatggtagcacagcattaattgtatataaggtacctttgatattcacatcaatcattgcttcccatgcttcaacgtcaccctcagttattgctgatgataacattaagccagcactattcactaaaatatcaatctgaccaaatttttcttttgttttttcaactaattctgttacttcttctttgtgtgtaacatccacaatacttgtctcaactactgcttgtttattatcttgtatacgtttagccacttctgctaagcgcgactcatctcgtcctgttaagacaactttgactccttgattagctaatgtttcggctatacttgcaccgataccactactcgctcctgttacgactgccactttatcttgtaattcaaccatgtatatcttcctttctatttatacttctctatatttatttaaatatttctctaattacgattattgtatcatggcgttttcattttcttgaaagttttgcttttgattagcttgtcaatatccatatttcaatataaagtgggtatataataaagtatatattaataatgtttattgtagcgttaagggaggggcatatatattatgaattttgatgaaaaattagaagcattaagaaaatcaatagatcgaacaagtttccaatttcattttgaagatttattcgacaaagatgaatggattcaaatgcctatattagaacgacaacaattagaaaaaactttccgtaaatatgtagcacaacataatcacttacgtattccttatgcatctgaagaacatattcgtatgcgtatgtacaactctttatatgattttaatgaaatcaagcataattttaaagattatgtttaattgtcatcattaaatactataactaaaagcctatgttactggatggacagtaaacataggctttttaaaatactttagggcgtttcaaataaatcatgaaagttaatacgagggagaaaaactttaataataatacccgtttgctatattcataaattgtgaatacaacaaaactttttaattacttgatgcatacagtgtattaatgattaactaatagcgtctttttcaatccatagttgtataatttttctgcatcaatataagctatatagtcaatacttctgtatccatctttaatatcattaataataccttgatttacacctgtatgaatgtaaatttcatagctgctttcatttgaaaaaataaccttttcaattacttctctcatatgaatcactccgtattttttctttcgcaaagcttgcgtcatttattacatctttatcttaattcataaggatacaaattggaagtgttttgtgattaatttcacaaatttatcacttttgcctttctccggttaatttccttagttttaaaattgacaatttaatcaatacagcaattttaacttctgttaagatacacgaagtttttaaaatgccttatactgttcatttaaaatatcatctttcactctacgtagcccagaaacagataaattcatcctatttaaaatgtctaatgcctcatccacattgccattttctactgcagtaagcagttgattttctaaattatagcgttgctctatttctcttaacgtataatcaatctgagtcttagattctgcaagtgacgccgtacttgaatgaaaatggaaatctattttttcagtctcatacacaatatttcgcttcttcaaaaagcgaatttcttctgtgcttttacatggtgacacagtggtatacgtaataaatattgctttaatatagacaatttagatattttaatattcgtttgttgtagcagttcattacaacgtcgttcattaggtcgctgttccatgtatggtcctataatgtaaatctgtttatatttcttaaacttaaatattaagaagttcacatcgaaaacattggtataatggtaaattttattactgcccatattgacgataaaatgtttcaactcatctttgaattgtttacgtgacgtatttgtaaatggtgacttgatatgattgctgatcccttttaagtcatccatatcatagccttctagttgaatccccaataattgcaacgcattcgtctgtaaaatttctaatgtttcctcgttcataaaaaaaacaccctctattcctttattttattataactaaaaataaggataaggtgtgtttcgaaattaattttatatacataaatatcaacaagcataaacaaagttatagattataataaaacttttatatatctttcttgccaaacttcaatttaaaaggtgcatacaacaatacaaaaattaatacaaggcctaggtatccgattaatgggtagaagattgctactaaatctgtaaaaccaacaaaactcagacatagacctacaataacggtaacagcatagaacagtttgaagcgtttcgtatctacgactgtaaaccttgtagcaaacgcataaaacatacccaaacccgtattaaagatcattccaaaaataacaatagccataatgactccaagtattggtgaaatatgattcacaatacctaacattggcatttccatatttccaacagtatctatttgcgtgaatatagccagatgactcaatacaatcatgacgcctaacgcgagtccaccaactagtccaccaatagctgctactttcgtattcttctctgaacctcccataacaatggccattgatgcacctacagctgtattaaatgatgcgtagttcacacctgctacaaaccaattcggtaatgttgaaggtttcgcatcagacaaagtatttaactgtgaaaatgaactatccgttgtcataaaactataaactgaaataataattataaaaatgattaaaaacggcgtaatatttccaattacttttacaacaccttcaactttcagcatacccgcgagaatgataagtacagtcatcaatagtgtgccaacgatagatggtaagccaaactgctgattaagatttgaacctgcacctgcaatcatgacaacccctacaccaaataatgtgaatatgatgactaaatcaatcacccatcccaataattttccaaacattgacttacccgtgatacgatgaatgacttctttatgagaatcagtttcagacttacttcccagccaaactaacatcattccaacatatgtaaataatgcggtcgttatcattgcgccgaatgttcccatcatgccaaaacttgtgaagtattggagcacttcttgtccagaagcgaatcctgcaccaacaatgacgccaataaaagcactcgcaatcaataatatccttttcattttccaaccccctatagcgatataactacttcctttacaacatacttccgtttatctctatactttaatctagcatctaaattatacattccaatgcattttcagtatgttcagacaatagtaacttctctattttatcattttaaaattaattcatgttgtaattcaatggtctcacattcaaacaaacggcattgatatcaacattattaaatttgtttcattaaaaaatcggacaaaaatgattttgtccgaagcatctgtttatctattatcttagtaaataaccaccatctactggtaatgatatacctgttacataatctgaggcttcactagctagaaatataagtggacccattaaattttccagaacaccccattctcccgatggtatatgtcctttaatttctcgccctcgaattggatcttcttctagcactttcgtcatatcagtacggatataaccaggagataatgcatttacttgtatattgtatggtgccaaagcatctgtataggcgcgcgtaatgccaactacgccatgcttactcgctgcgtaaggaaagatattttttccagcgcggtatgactgcatagaacctatattaatgattttacctgagccttgttctgtcatcactttagccgcttcgtgagccatataatacgttgcatttaaattaatttctatgacattttgccaatcttcatctttataatctaaaatattatttctaatttgaacacctgcattattaactaatatatcaagtgatccccacgttccaactgcatttgtgataacctttgctgcagaacccgattcggttaaatcttgctgaaggaaggatacattaccctcatgctgtttcacatatgctttcatttcatcccaggcattggttgaagaactaactacagttacatttgcccatacattgttaaagcaatggtataatatttgcctaatccgcgtgcaccgcctgttactatcgcatttttaccttttaaagaaaaactttctaaactaaattttgtcattttcaaactccttcactgacccttttacgttaaaacattgtccaagtattcatttagtaagcctttgtaccatgctataaaataaaccaaactcaataattaacttaatttaaaataagcttaatctaagcctttaaaaattgaagttatgttagtgagtctggtcaaaaaacatctacaatgtaaaccgtgatcctattcaatcttctatcgttttcactgctatgatttcgttttatacaaatatacttaaaatcaagataaagacaagacctgaaactgagataactgtttctagtaatgaccatgttaggaaggtttctttaactgttaaaccgaaatattctttgaacatccagaacccagcatcattaacatgagataaaataacactccctgcaccaattgctaataccactaatgcaacgttaacgtctgatgcttgtaataacggtaaaacgatacctgtggatgaaatagcagctacggttgatgacccaagtgcaatacgaagcactgcagctacaatccacgcaagtaatatcggagacatttctgtaccttcaaataatttagcgattgtatcaccgacaccgccatcaattaatacttgtttgaaagtaccgccaccaccaataattaaaatcatcattccgattggataaatcgcatttgaaactgaatccataatatcggcatttttacgtccttgtttgatacccattgtaaaaatcgcaaataagacagcgatcaacattgcagttgctgcagtaccaataaagtaaataaatgattcaaaaccattcgtcgctgattcatgtcctgttactaactgtacaattgttgataataacattaagataactggagacacagctgtcaaaaagctgatgccaaatcctggcatttcttcttcagtaaattctttttgtgcacctaaagctgatatgtccccttcacgaccataagctgatggtgtgattttttgtgcaattttattgaataatggtccagcaattaatgtcactggtattgcaataataataccgtatagtaatacatgtcctaagtttgcttgtaattcttttgcaattacaactgggccagggtgtggtggtaaaaatccgtgtgttacagatagcgccactaccattggtaagcctaattttaattgtgaaacattagctcgtttggcaatcgtaaataccaatggaattaataagacaagacctacttcaaagaataacgcaatacctacaataaatgcggcaactaacattgcccattgtacgtgcttatgaccgaatttctttataagcgtatcagctattcgcgtagcaccgccaccgtccgcaagtaatttaccgagaatggcacctagaccaaatattaaagcaatgtgacctagtgtactgcccatgccattttcgattgtttctatgattttatctaaaggcattcctagtaatatagcagttacaactgatgtaataataagtgaaataaacgtgtttaatttcaagaatatgatgagcgacaataatacaatgataccgattaccacagtgatcagtggccaaattgtttcaaacatttccgttctcccctttcaatatcaagattgaatttcagctaattgaaatcgccattcaatcttggtaacgctttcttaattacgtaaaatttttatccctaataatatgacacaggtaaggtaacgtcatgattaaaaatacattgtttgtttaaccatgacatccattatacctgctctaatatttcatcattcgtcttctgtcatatgttcgcgttggaatgctgctatttctgtataacgtgcttccaatgaacgacttaaattaataaatatagatattaactgttgatacgttcttacattatcctcattaggatgatgtttgtttgttgttccaaccatatcttctataattgaaaaatcatcaatttcacctaatgccttcatacctaatacgcaagcgcctaagcaagaactttcgtaactttctggcacaattaaatctgtatcaaatatatctgccatcatttgacgccagacttcacttttagcaaaaccaccagtcgccttgattgttttaggcgtttcattcatcacttcaataagcgcaagatacacagtgtatagattataaagtacaccttctaaagcggctcttatcatatgttctttcttatgtgatagtgttaaaccaaagaatgaacctcttgcatcagcattccataaaggcgcacgctctcccgctaaataagggtggaagattagtccatctgcaccgggtttgacattattagcaatcttggttaagacatcataagaatcaacgcctaaacgtttagctgtctctacttcactagctagtaattcatcgcgtaaccatctcagtacaacaccaccattattaactggaccaccaataacataatgatcttctgtcagaacatagcaaaatattctacctttatagtctgtacgtggtttgtcaatcacggttctgatggcaccagaagttccaatggtcactgcaacttcaccttttttaaatgcgttcacacctaaatttgaaagtacgccatcgcttgcacccactacaactggcgtattttcatcgatacccattaatgctgcatatctacgtttcataccttttaagatgtgtgtcgttggtacaatctcaggcaattgagattcagttatacctaaaagcgacaaggcttctttatcccattccaacgattccaaattaagcatccctgtcgaagaagccattgattgatcaatcacaaacgtttcaaaaagttgataaaagatataggtcttaatatccgcaaacgttgcagtttgattgaatatttcttgttgttcatgtttcatccagaatatcttagacaatggcgacattggatggataggtgtccctgttctttgataaatcgcatcgccattatgcttggttttaattgcttctgcatatcgactcgcacgattatcagcccaagttaaattctctgttaaacgttgatgacttgcgtccattgcaattaaactgtgcatttgtgcactaaatgaaattaatttgaggtcttctttagctatgtctgcctctctcataatatattttatggtcattaacacggcatcaaataattcatctggattctcttctgaaacttcaacatttggcgtgtgcaatggataaccaatattatgtttcattataaactgacctttttcgtcataaagtactgactttgtacttgttgtaccaatatcaacaccaatcatgtatttcatgatttcgcctcctacaatctttactgcattaaattgctaagttaaccaaaaactatcgatgtcttcaccaacatcatcaaagtttaaatggaatgctttatttaatttcttagcatcttgttgttctatcgcttctataaatatctcatggttatgatgaatacgttcaaaatcttccggattctcattcattcttttacgcatagataataatatgagtgattccatcactggtctcaaattattccagaatgtttttaaatattggtgctttgaagccataatcgttacttcatgaaatttcatatcatgttcagtgaaggcttctgcatcttcaaattgcactgcaactttcatcatttcaagctgctttctcatttcttttataatttgctcatgatttaagtttttaattctactaaaagcaaaggactctagcataactctcaaatcatagagttcctttttctctttatcttcaaacggtaaaacttctgctcccattcgttcaagatgaatgagttggtcttgctttaataatttaaatgcatctctcactggtgatcgacttacattatattctttagcaatttggttctccgttaataatgtatctggtgctatttttccatctacaattctcagtcgaatttctgccgcaatcatttcgccctttgaaacaccttctaaccattgttctgggtaatcgtatttcactaaaacatcacctcgataactttactatatacttgtatacaagtatattaaaacacaagtacctaatttgcaagcgcttgcaattataaatatcgttttcttaaagtaaaaaaaacgatatgtcaggtttcatccctcacacatcagtttcaaaaatttttttattcatatgaaatttgattaagattggacaattgctacacagtgatgatcttggtcacaatgtggacattgtaattttctcgttttaggtgtatgtgccgaaaacatccattgctttaaattgggtttaaatgttgcttggcaatttggacaaacatagcttagtgccgtataagtaaatattgtaaaatttacagcataggtaaacaatataggtgaggtagataacaatggccaccattttttagtgaccatacttgctattaaagcagtatattgaaatatacctataggtatgatgcgatacaatacagattgtttaaattgtttcatttttggtttttgatttacgtatgtttttgttactaatagtttttctaaaggcacttcagaacgtcgaccaatatattgtttaaattgtcgtatctctgcaagcaaagtcttatggctctgcatttccttttctatctctaattccttttgttctaacataacacgaaccgttttcaacttatttttttcattcaagattgttttaatatctttcaaggagaaattaaaagcttttaaaattagaatgatttctaaatcttgtttgctttattcatcaaatatacgccgcccattttttgctgtttgtaccgtttttaataaaccttttctatcataatattgaatggtccgaacagaaacattttttagtttcgctaattcacctgtttgatattggctcatgtaatcacctcctgagtctaatcatagttgatgacgcgacgtcatgagcaagcaaattgttatattgcattgttattatttaattatcaaatacttcagaatgtatttcctgcattttactttctactgatgtaatgtctgttgcacattgtttcaatatcgctttatatttttccgtattttctgtgtttttataacgtattttatgctctaagctcgcccacatatccattccaatcgttcttatttgtatttctacgggaactatttcaacagaatgcgctaaataaactggaatggttacaacaatatgtaaacttctataaccattttctttcggatgttcgatataatctttacgtttaatcaatttcacgtcttcttgttttaataataatttttcaataacatatatatcatcaaagtaattacaaactactctaataccggcaatatctaatatgttttcttttgctgactcagtactaatagggtaacgctttctgtctaattttttaattaagcttctcatctctttcacacgacgttccatgtgatgaatgggattatgtttatacatctgttgaaattaatcatctaaaatatctaactttgtactaatttctttaagagccgacgtataaagttgttctaaagcaacaaagcccacaaccatatctaatgcttcttctgacgcgtttatatgatcaatactttccttaaattcagctttcaaatcgtcaatgtttaccgagggtttacgttctatatacattttgtcttacctccaataaaaaacttctttaaaattcattatagcttattataattgacttattaaatttaaaagctattcaaattttacgcttctaaaagattcaatttgtgttttaagtggttattttcaatacagaaaagcaacccaatgccttcaatttatgcattggattgcccttttaattattctagcatgcttaattttattcatcttttttatgttcgataatttcagttctacggttatcagcgatattacgtgcacgtttcattgcatcttcttttttatcgaaactatcagatgcctgtttcgcaccatctgatttaatcttccattcatcatcttcataataaacatgtacatctttcttgtttaatgaaggatctgctgaatcatctttttcatgtttagtaatttttttgttttttaaggattccaattctttttcggatgcatctttataccaagattctgcttgctttgtagcaataggtatcacgttactctcctcataaccatcttttaacagggcattgccaatatcaatggctttttttcgttcaagtttatccatatttttccaactttgagggtaatcttccattgtccaaggcattatgagcacttccaatctgttttcttcttgttatctatttaccactaaaattgaataataaacgcgcgctaacgcttgatattttgtactcttataatatggttcatgattaatactggtcataaagggaattataaaacagttgaaatttaatcatatacatagattggtggtgttgtttatggctaatatcaccgttggtttgatcccttcacccgatatgccacataaaattataaataaaatatatactgatttaccgaatgaaatccgtcatcatacagggggaaatgatgaatggcatattgaaaaacatattgcttcaattgtaggcactgctgagcacatggataaagcaatggatatcactacgaatatgaaaaaacaaaaagcatgggactatgctatttgtattacagatttacctaatctttctaacaataaaaccgtcgtatgtgacatagacttaacaaataatattgccttgatttcattaccagcattaggtgcaataaatttaaaacaaaaattacgaaattttatttcatttgtcattcaatatatgcatagtaatggttcagataataatctcttgaatagtcaacactttaaattaacgaaatttaccacagttactccaaatgaagaagataaaaataaaaatcatttacgtatcatttcaacatctaccttcataggttggttacacctcatatctggtatgacttttgctaatgagccatggtcaacaatttttgatttcaaaaaaatcatttctgtctcctttgcgacaggtacttatatttcaattttctctactccttgggatataagcttagattatgattattggcgcttcattttacttatgtttatgtccattttcggcatggttggttggcttatttattcttataatttatgggaacgtaaaaacccaaaaacacaaaagttatatagatatatctataattttacaacgttgaccacattaactgtaattacgctttttaattttataaccctatttctattactaaccattagcacattattatttgtacctccggaattgttttccaactggacttcgcttggtagtaaacaacccactttaatcaattatattaatttgatatggtttatcacttctttaggaatcttagcaggtgcaatgggatcaaccgtagaaaatgctgacaagattaaacgtgctacttattcattcagacaatattatagaaacaagcaattagaacaagaaaatgatgcggattataataacgatgaagaatcaaatgattatgcaggtcgaaaacaaacgcacagagaggaggaagaataatgtgcaatcacattatcaagataggtttagtagctgcacctggtgtgactgaaacaatagccaaccatttgcaacaagagctaccttcattgttatcatctgctataaattcagaagttgaatggcaaattgatacaatgattgacccacttactggttctgctgaaacggtgcaaaagatatacactaaaatttctgattatcaaaatgataatgaatggcaatatacgattggtttaacggatttaccaattattaaaaacaagcatgttgtcgcatttgatatcaatagtaaaaatggcgcaagcttaatttcattacctgcatatggttggcgccccataaaaaaaagaattaagcattccatatcgggcattattaaagcaattgacgaaaatatgaatccaaaccaatcgtctactcaacatcatagtgaagaacaattaaattcacagttccccttttcaactttagaaacacatactgagtactttgaagatacagactctcaacatactttatattatgtatcttcgaatacgagaggcatgatacgtttaattagtgggatgacttttgctaacaacccttttaatatgctcaaaagcctcagtaatgtagttactattgcctttacaactggtgcctttggtattgtctttacaacaatgtggaatttaagttttgtttattctggatggcgcatgttattaattatgttggtcgctattttaggtatgatgttgtgggttattgttgcacatggtttatgggaatctacttctgaaagtaaagatagacaaataacaatattatacaatttaactacaactttaacgttaactgtatccattgctttttattatgtcatattgttttgtcttttcttgttagccacactcgttgtattaccaccaggatatttagggcaagcactacagttacagggctcggctaactttatgacttatattaatctcgcttggtttgcaacatccatttctactgttgcaggtgcaattggtgctggattaaataatgaatcacaaatactagaaagtacatacggttatcgccaaaaacaacgttatcaaaaaatgaatgaagataaacaaaatgaagcagaaaaagaacaacatgcgcaagctgccgttgaaaagaaaaaacaagaaagtgaagcaaaggctagacaagaacgcagcgatgattgacactttcaagtggcggcagtctgacctaagacaacccgcacactacctatctcaatatactcaaatatttttaataaaaaggccaagacattaataaatgtcttggccttttttcaaatcaccatatttaattaagagataatttaacttcttttcgagcattgacacagttgttttgtatactcattaaagctgtttttatatgtgtatattgcggtaatgcagccatttcttgaacttgaatattcgtgcctctttcaaaatgtttggctatattttcaaagacaagtaaatactgtcccatcgtttcatcatcaatatgatatcgtttttcattacttagtgctcttgttaacataaagctgatttcttctaatgcgtaaatgcttggataataatactgtataaccattttattactgaatagttcaccgtttgcactgttatacacttgggtcatattattcaatttcacacttagttttaacatttcttttttatcttgttctctagatgcatatttgttacttgagaataagtaatgaaataatatggattcgtctctcgctacggctgctaatgtacttggcaacatagaagatgctgtttttctaccaatcactagcaagcaaatcactgcgatgataattcctacaattacatcaataattcttggtaatgcaatgagtatggttagatgatttgacgctaatccatttaacaagataacttgtatcgtgataaatataactgcaaatgagtaatttgcacctacaaacatttctgtcacaccggcagctaaagccaataaaacaatggctactggtacaggcggtgttgttaataagatgagtgataacatcaacaccccgaagatcgtgccaacgccccttgacccagctctttcaaagctatgcagtgttgtagagcctagtaagactgtatgtgtactcaaaggtatccagtaggctttttcaaaatcaaacattaaagcaataaaaatagaaattgccataatgactgtgtagcgtattgtatttctaaatataaaagaatctaacgtcaagtttttcaacatgcgatgtccataaattggtacacgaatatctatttcatgttcgactctatcattatttgcattcataattgcgtcaactttaatgatactatctactaaactttgatactctttatcgaaatctacttttttagtccactgttgggttgacttaccaagtgaataaacacgtttaatgacaaaatccgtcatttcttttatttccgttggtaacggacgtgcattacgttcattgagttccaatagttcggaatgaataccttgcgccgtattatgcaataataataagcgttgaaattcaggtgaggttttcgattttggtgtacttgacgtaatcaattgattatccgaatttctgaaagctgttactgcaaattgtgatgctttcgcaaacgctttgggatcatcaaagttatagaccaattgtttaataatattataatcatttttaatggctttgatttctgtagattctttagatagtaggattacaacgattacaatcagtgttgctaataatccacctacaaacattgctagacctctagttaatgcttcttctggcgctactggtaaattaattggcaaactgaaggcaacgataaagaaggttgaagatggccctgggatatttaacgaactaaagatgtaatatggaataacagttactaatagtagtaacacaccaaatataagtggttgattaactgtgagtgtccctaaaatcatcgcaatggataaacctaacgatgaaaataagacaatgcgtaacttagatctcttaggaccgccaaatacataaatatgcgctagcgtccctgttgaaatgagtaatcccgtagaaaagtgacctgtcaaatagccaacaagtaacggaatgagcatgagaatacattgtcttatacctttagcaacatcgattttcatcgaattgaaacgtattaatgactttaaatatttaatcaatgttgtcatgcatctcctttaatttttaatatttcgtattttatttcatttattgtcaccatatcaaatgacatttaaaaatacgttactcataaataacgtatttttcagaaaaacatataggtaaagtaaacatcaacttacttttcattttataaaatctatatcttcattctaaaatatccgcgcataaattcgtaacaacaccttactattttaacactttttttaaattcttctagtggcgatgtctttaaaataaattcacctccatatcattgtctttatattcacatacatacgtgctcatttaattcttctcaaatcgctgtgtaaatcatggcaagtgctatatagacagagttcatgactaaatattcaaatttagctatttatccatctaatacgttatgtaatgacattatatttacacaataacaagcccatttttttctctcttatcacactattcaaaaaaaccctgaactcacagttatttgtaagatcagggtttaaaatattaatttgaacttagcactttaatttcaggttcttcaactaagtattgtttaacttcgctaaagaattgttgaaagtgttctgactgattatgcgcttccaaagcttgttcatctttatatcgttcaataaaagcaaacgtattcggttcatctgtattttcaaaatgttcatagtataatgcacctgcttcttgatttgaagcgcgctttaatggttctattaaagctaagtaattattacgttgagcagcatccactttcataatcgcattgatagtaatcatatcatttcctccattataagcatgatgtttaataattacctaaaagttaataaattaaacattacaagtcttctttttctacgataagtggttggtctggttttacaaagaaccacataataattgcgaaaacaactgggataataacaagttctaacgttactgtccaacctacaatatcaaccatcataccagctaatagtggacttaataacgcaccaatgttcccccataaattcatccaacctgatacagaacctgagaagttacgtcctaaatctgttgctgctgcccagctcattccagtcgcaataccaataccacctaaacaaagcgataaccaaataacatttgttactaaattatcc

SEQ ID NO: 22 - DNA, 24605 bp, Staphylococcus saprophyticus
accaatgcaccaaattgacatggataaaataaatagcacattaaatattaaataagcgatgcattctcaaagttaacaatttaattatgttgtaaagttaattaagtactaattataaagtaacgtattttgtaactttttacaaaattaaaaattaatcattcgtgtttctttagccatttctaaatagaatttattaatattaaacactctatgcaaaccctccagcctttaaattcactttccaaacataaaaaacgccaatttctatttaattacaatagaaatcggcgtttttagttaatctcagatgtttatatccaagacatatctttattttttaataagtactcattttatttagcgtattgatttactaaatcttgaacttcttcagaagtagcacaatcaattgctctttgagctaattcttccatttcattttgacttaaacctttgatttgacgacgtgctttaagtactgaggtagcactcattgagaactcatctaatcctaagcctaataacaatggaattgcaatttcatcgccagccatttctccacacataccagtccatttaccttctttatgagaagcttctattacttgttttactaaacgtaatattgaaggattatatggttgatacaagtaagaaacacgttctgacattctatcagcagccattgtatattgaattaaatcattcgttcctatactgaagaaatcaacttctttagcaaatacatctgccaacgcagcagtagaaggaatttctaccataataccaagttcgatatcatcagaaacttcaatgccttcatttgttaagttatctttttcttcaagtaacaatgctttagcatcacggaactcttggattgtagctaccatagggaacatgatattcaatttaccaaaagcagatgcacgtaataatgcacgcaactgtggtctgaaaatatcaggttgatctaggcataaacggatagcacggtaacctaagaaaggattcatttcttcaggtaaattcagataaggtagttctttatctccaccaatatctaaagtacgtacaacaacgcgtttatcttccatcgtttctaatacttttttataagcttcgaactgctcatcttcagttggcatttcgtctctacccatatataaaaattcagtacggtataatccaatgccctctgcaccattttcaattacaccttttaaatcattcggtgtaccgatattggcagtaagttcagcgtgtctaccatcaattgtagttgtctcttcatcgcgtaatttttgtaattcttgcttgtcttcaaagaaacgttcacgcttgttttgataagcaatgacttcatcttcagtaggatcaatgatgacttcacctgttaaaccgtcaacaataatcatgtcaccttgtttaacttcttgagtaatagatttagtacctacaactgcagcaatttctaatgagcgactcataattgctgaatgtgaagttctaccacctatattagttacaaatccttgtacaaattctttatttaattgagcagtatctgaaggtgttaaatcgttaccgattataacaacgctttcatcaatcatactaggatttggtaattctacacctaaaatatgtgctaacacacgttttgaaacatcgcggatatcagcagcacgttctttcatatattcattatccattgattcaaaaatagtaatgaattgtccagttacatcagataatgcagttggtgcgttaacttgttcattcttaattttttcttcgattggttgaattaattcaggatcatctaaaacaagtaaatgcgcatcaaaaattgctgctttatcagcacctaaattttgttcagcattatttctaattttagttaattcaactttggatgtttgaatagcattattgaactttgcaatctcagcatctacatctgacactttttcgctatcaaatgataaatctggttcaactaataagtatgctttagctatagctacaccgtcagatgcagctataccatttatataattagacataattatttagttaatccttctttagataaaatgtcagtgattgcttcaattgcatctttttcatcgctaccgtcagcgtagattgtaatttcagcatctttacctacacctaaactcataacacccatgattgatttcaagttaacttttttaccgttatattctaattgaatatcagaatcaaattttgaggcagtttgaacaagcattgtcgctggacgagcgtgaatacctgtttcgtcgataattacatatgatttttgttccataaaatgatttctccttcgtatagttagaatcgttggtttattataaaacctagcatagttttatataataacattaccaaattattattataaattcaattcgttgcacccatgacatgacaatattcagagaattttagctaatttgtgaaaacgctatagttttaaacaagttctttcacaactttttcacatttttgaatatgttcatctccaatttttttcataaagtaataactaattgatgctgaaatagcctgccccacaaccgggaaccatttcgtttgtttcgcagctacacgttttgcaacatctctaacgacaacttttaatatcgcattcgatatttttttacctataaattgactaccttgaatcgccgcggcagctaagacacgctctttcatatcatcgcccatgttattcacttgtttatgatctaatccataaattttattaacatcttcaataatatctctcatcaatttaatatcgacaccaaaatctaaaccgggtattggcacaatactgatacttgatgataaaacagatttttttctaactagtgcctgtgcacgtttacgtcgttcttcaatttctatatttgtggtaggtatattacttttttgtttgatatcttcaatttttaatactttattaccaactttttgtgtaacattatttgtgattttatttttaaaacccattttattcactccttagtaaattacttcgtattaaaaagaatacccttttttcataattttactttatttttacaaaaacagcctttaaatatttagaaggtttatagtgtggatgtgttttgaaatcttttggcaagcccattacttctacaatttcataatctacttcttcttctgttaatgtttgattgattacatttttgaatgatttcaaagaaaacgtactattatttgtgcataacagtaatgtaccgtcaggccctaatatttcaagtgcacctttaattaatttatcgtaatcttttaatacggaaaaagtttttttcttgtttctagcaaaacttggtggatcaataacaatcgtatcgtaaaacaagtcatgacgacgcgcataattaaagtaatcaaaagtgtccattacataaatatattgtgacttaggatcaataccattcaagccaaaattttcttctgtaagtgcacgtgatcggtttgctaaatctacgcttgttgtcattgttgcgttttcggcagctataacagaaaatgcacccgtataactaaatacatttaatatttctttatcttcagcataatgatcttttaatttttttcgtacttctttttgatctaaaaatatgcctgtcataggtccatcatttaaatctacattatagaatgtgaaattttcttcaataataattggaaactcaggtgcttcaccatcaacaaatccaccttgaatttctgcgtctttaaatctcattttttcaaatatagacgtatattcgaatacattttctaacgctgataatacattataacggaatttataaatgccttttgaataccattggattaagaaatgaccatcatagttatctatggttaaaccacctataccatcgccttcaccattaaaaacacgaaaagcattcgtcccatcaatattatagaaatattcacgttcagctttggcatttttaaataatgtttcaaaaaattgtgtgttaatgacttcatctttgtcatagctcaatacccagccaacgcctttatgctgtctaccaacataagcagtagctatatattgatctctatcgttcattaaataaaataggtccccctcttttaaatgatcgtgtgcataaatatcttcttcatctactaatgggtattcatttaaatatttcgtttcttttcctctatttaacgtggcaattttcataaatttatgtcagcctttctacttttatttatatttattatttgcttattcattttatcatctcattaacatcgtaacatcaattatctacaattcaccaaaatattatatctgaaacttcataagtatttttatagaaatttaatttttcaataaagattgggtcgcctcaccttatcaaatatagtgaatggcatcagccgatgctcatgaataagtgcgactaatccacataaaatgtgaaagaaattctatttagaagttgtgttttacctttactttcaaataaaaaaagcctgagacaatgccatgtcccagacttcttccttgtttctattaaagtaattaatatttagttggttcacgtaacttcataacaaatgctacaaatatagccaatagcataatgattaaaattggtgtgataaagatggataataataatccgtgaaccataatgttcataaactcagtcagtaatttgaagaataataaactgaccataaacatttgcagataatagaacctatcttttaagaaattcgttaatgttgtcaatatataaataatgataataatcattaaaaagaatagcgtaatccattctatcacatattgtgtttgggaaatttcccaattacctgaaacaaaaagtgaattcctattgttaaattcaattaaagtaaagaataataagatggctccacagaacaactctacatatgcaggtttaatccatttaggttttttcatccaatttggaatatcatcctcttgaatatcgataatttctttccatttagcaataaatttatcttttttatctctagctttttgaatatcaacacttctgcgcgttttacgtgtaaattctgttgttttatcttgtagtgtcttccatgtttctttcgtttgatttgttactgatcctttgttagttcttgataattctggttcttcttccccaagttcttgttttgttaaaggaagtgatcttcttaaaaataagaagttccaaatagacatttgtccaagtaaccacatgataataaagaatgtgttaacactcaaaatatcaataggaatgatttcatcgctttcaattcttccgtataaaacaatttgcgttattaagtaacttatcccataactgaaaataatccataaataatgatattttctatgttctgtatttaactcgtccttataaacgatataaccaatatgaattgcaaatggtattacgaaaataatagcaaaaaagctataaacttgagtcatcaatatcagtgttatgatgaaaaaaagaataccaataactaaaaagaatactgaaatatcatagtcatatcttgtcgttctatataaagtaaagccaatcataatgacaccaataccaaataaagcaataatgatggcactaattatcgggaaattacctatgtaattactcattactctaattatttcactaaaaaatgcatttataaaatcccatacattatgaatgtgcaaatcaattttacctttaccatttaatttattaattaatggtaaattaattaaaatgataagacctgtgaaaagcgaaacgatgcctataacataactatataatatctcagcgtgtttcttcaaaaaagacataccattcacctcaaaagttattatatatgaacatttagttcttgtctttaattatctaataaataagtccatagtatgatataaaatgacttatagtcaaattcccacttacaattcatgtttaaacaattttataaatttaacttattaagtacattatcgatgcattatttacattatccattaattaacattaatctcatatcaaactattgtaattatattgaagtgtttatattttattcaattgtggtatatactaaatatagataatcataactatgaaggagtgctttaattatgagtaaagaagaattaaataaagaagcagctgaaaaagctaaaaaagcagaggataaattaaaagaagaaaaagaatctgcaaaagataacactgaagaaactaaacaaaatattcaagatactttagactagtatagatacttggtattaatagtaattcaatataaatgtaaatccgatatgggagtgcgacatcaaatcttatcgaaatgaggtttgtgtccattcctatttttaagggttttataacatgattacatgtaataaacttaaataacaacgtttgtccttaaaataatcactctattaaccaacaatttctagcataaccttgacataaacgacgaaaagtcatacattataattaaatttaaataaatcattcgcactaggggtgttttgtgactgagatgaggtataccctcaaaccctttgaacctgatctagattaaactagcgtaggaaagtgtattgcgatatcactgagtaactttggtatccgtatgcctatataaaaacgcgcaactttctagaaggttgtgcgttttttatattaggaggaacaatgatgtcaaaaggtttaaaactatccgaaatacttgtaactgtgcttatcgcagttgttttcgctattatttataatatttggaattttgtctataaagctgtacaggtaactggacttcattttgaagaactcacttatggtgcctggtttatggcagcagtcgtagcttatctcataattccaaaagccggtattgctgtgcttgcagaatttgctgcaggtgctggtgaaacaattgtaatgggtcgttttgatattgcaacgatggtctatgcattattacaaggtttagcttgcgaaattatatttgctatttttcgatataaatcacgttcagcaatggttgcgatgctagcaggatttttagcttcagttgcaacactacctttagattttgcctatggttatctaggagaagtcgcgggttggaatcttgctttatacatcatatttagattaattagcggtattatcgttgccggtctcttatcttattatattgttaaagcacttgaccaaactggtgtaacaaaattattcagaccagcaacccagagtgattatgacaatctataaggagtaataatgttgatagctactaaaaatttacgcttgaaatatccaaatggtcaaaaaaaaatattcgacaatttgtctattcaaataaaagataaagaaaaggtattattattaggtccttctggttcaggtaaaagtactttattaaacgtacttagtggcattgtgccaaacttgatagatttgccgttaaaatatgatgcattagaagtcgatccttcaagtggtgtcatattccaagatccagatactcaattttgtatgcctaaagtttatgaagaacttgcatttgtactagaaaatcaacaagttcctcgggaagaaatggatcatcgtattgaggaagcactaatgacagttggattaaacgtggacaaaaatcaatatattaatgaattaagtggcggtatgaaacaaaaacttgcgattgctgagacaattttacaacaagcaacgacactatttttagatgaacctaccgcgatgttagatgtagagtcaactgctgatttatggcaaaaaattcaatcattgtggcgagaccaaactgtacttatagtagaacacaaagtcgaacatatatggcaacatgtcgatcgtgtcgttttaatgaattatgatggtgccatcattgcagatgccccaccttctcaaattttaaattattatgaagcgctattaactgaatatggtgtttggcatccaaaagcttggcattctgcaccaaaagcactaaatttttcagattctgattcatctcattttaatttccaaattcaagatgcagttattaaacgtggaaagcagcaactcattaacattcctaagttaaatgtcaatgcgggagaatggatatccattaccgggtccaatggttcaggtaaaacttcactgctcgaatcaatgatgcaattaattaaatatgaaggtcagatgtacatcaatcatcatatttacactaaaattaaatctgcagcaaaatctatgtatcttgtgtatcaaaatcccgaattacaatttataacaaattctgtatacgacgaaattcatatacaaaacaaaaacaaatttaattcaacggatgaagctaaacagcaaactgaatcattattaaaaacgcttaacttaacatcagtacaaatacaacacccttatgaattatctatgggacaaaaacgacgcttaagtgttgccattgctttaagtgcttcttctgatttaattttacttgacgaacctacatttggacttgatagtcacaatacatttaacctaattaagctgtttcaacagagaattaaacaaggacaaaccattatcatggttacacatgacccagaaattattgcacgttacccaactcgaagactacatctcgaacatcaccatttaatagaaaagacaggtgatacgtatgtttgatatgtggaaaaaacaccattcctttatcgatgatgtaaatatcattactaaattagggattgctgttatattattcttctttgtcatatttgttcatcaattcgattatatgttttatattacgtgcttaatgcttgctctattattaatattcaatggcttgcaatttaaaattaccttagtatttatcacttttacgatacttttcagtttagtgtccgcattattcatgattttttatggtgatgggacgcacttactattcaaatttgggtttatacaaataacaactgaaagtttgtatcgtggcttacatttagcgatgcgtacaacaacggtttcattttttggaatcttaattgcttttacttcacaaatcgttcttgtattttatagtttaatgcaacatttaaaagtaaaacccaaagtagcatatgcctttatggcggcaatacgcatggtgccattaatgtttatgtcttttttacaattaagaaaatcattaaaaatacgttatcaattaataagtgcccaaaattatcgaggtataaaaagagtcaagcacctcatcattccgttattaagtcaaaacatcaggaaggcacatcagctttcagtagcaatggaaaaaaaaggcttcaaagatgggcctcgaacatattattatcctgcacctttctcgtataaagatattctgttaattatagttatgggactcatattaataagtgcctattacttatcactatatttcccaataactggaatcgacgatgtccgtataacaagtatttattaaaaaagttcaactaacttttcgaaatcatttttatccaaaaaaataaaagcgatggaacaaaacctaaaccagtttgttccatcgcttttttgctatttttgttttatcgctttgtcactgatgtcagaacgataaaataatgcattactttgaatttggtcaaccgcttcataagcattagctttagcttcactaatgtcgctaccttcgcctaaagcgagaataacacgacctcctgaagttacgtaatgttgatcaactttatttaaaccacttacaaagtatcttccatctaatgtaaaccctgaaacgacctcacctttattataagtacctggatagcctttagacgcaagcataacccctacaaccgcatcttttttccacttaaattgaatcggttgcttcgcctctaaatctaaaatgtgttgcatcaaatcactttccattcgagtcaacaacacttgcgcttctggatctccaaaccttgcattaaactcaatcaccttaggaccatcttttgttataattgcgcctatatatagcacaccaaaaaatgaatagccctctttcgccattgcttgtgcaattggctgagcaatttctttatttgtacgttctatcatacccttatcaatatgaggtaccggacagtatgctcccataccaccagtattaggaccttcatcattgtcaaacgcacgtttatgatcttgcgcaatacaatcaaatggcacagcataatcttgattaacaaatgtcataagtgaaaattcctcgccttcaagaaattgttcaaatacaactgtgccattttcttcagaatataaaatgtctattccttcacgtgcttcatcgatattattagcaataataacacctttacctgcggctaatccatcttttttcagtacaattggaaattcacatgtgtcaatataggctaatgcatctgttttgttatttgtttctttgtaagctgcagttggaatgtcatacttttccatgagttgttttgcaaataattttgaaccttcaatttgtgctgcagcttcatttggaccaaatacttttatattttctgtttgcaatttatcggttaatccttcggttaatggctgttcaggtccaataattacccatgaaacattctgtgtcttagcaaaatctacaattttttcatgattcgcttcatctatatctgtatgtactgtcgctatatttttcatagcgccattgcctggtatcacatgaatttcattaataagtggagactgttttaatttaaatgctaatacatgctctctaccacctgcaccaattacgagtactttcataagctacatttcctccaatattaattaatgtttaaaatgtcttacgcctgttgtaaccattgcaataccatgtttatttgccatatcaatagattcttgatctttgatagaaccacctggttgaataattgctttaataccagaatttgcagctaattctaccgtgtcatccatagggaagaaaccatctgaaaccatagcaacgtcatcgtttatttcaatcgctctttcaattgcaatttgagcagaacctactctattcatttgacctgcaccaatacccactgtttgttttgcattacttaagataacagcattacttttaactgatgcaacaactttccatccaagaagcatagcatcccattgcgcttctgttggctcaacttctgtaacgactgtcatgtcttctctatttaatttgacattatctttatcttgtacaagataacctcctgatacagagacaagttcttgttcactattatcaattgtcatatcaatctctaaaagcctaatatttttctttttacctaacacttctagagcttcttgtgtaaattttggtgcaataacaacttctaaaaagataccatgcaatacttctgccaatgatttttctacagttctattcaaagcaacaataccaccaaaaatagactgattatctgcatcgaaagcatgtttatatgcctcatcaattgtttcagcaacgcccacgccacatggattcatatgcttaacagcaacagcagcaggttgttcaaattgtttcaccaatgataacgctgcatccgcatctttgatattgttatagcttaattgcttgccatgtaattgtttggcacctgctaaagtatgtttggcatcagatgttctaacaaaataagctgattgttgtggattttcaccataacgtaaactttccttattatctttaaaatagtctacaatcgctgcgtcatattcatttgtatgttcaaatactttaatcataagtgatttgcgataagcttcatctaatgtgccatttttcaatttatcaatcacttcattataatcagcaggatgtacaacggtgataacatgtttgaagttctttgctgcagcacgcagcatcgttggtccaccgatatcaatgttttcaattgcatcttcttctgtcacattagggtttgcaaccgtttctttaaatggatataaattgacaactaccatatctattaaatcaataccttgtgcttgcagttgttctaaatgttcaggtttatctctatcagctaaaataccgccgtgtacagatggatgtaatgttttaactctgccatccataatttcttcaaactctgtcaactctgaaatcgacttcacaggtaacccgccattggctaattcacgcattgttccgcccgttgaatataattcataattttgctctattaatgattgaccaaaggttacaatacctgctttattagacacacttaatattgctttcttcatttaaattagcacctcttattgaatgatttttgatatgacttctggatataattcatgctctattgctttaattctttcttcaagatcagatttattatcgtccggataaatatcacattgacgttgttcaataatttctcccgtatccataccactgtcaacataatgtactgttgaaccagttattgtatcgccacttgctagcgcttgtcctatagcatctttccctttatattttggtaataatgaagggtgaatatttaaaatgcgtttatcataagctcttaaaatattttcacctattaatttcatatagccagctagaacaatccactctactttttcagacgttaaccattctataattttacgttcataatccgctttagaatcaaaatttttcaattcattaatatgaacatctaaatgatatttgcgcgcgcgttcaatacaatatgcatttacttgatctgtataaagtgaggttacttcaatatttggtagttccccttgtttgattttagacataatactttcaaaattacttccagaaccagaagcaaatatagctattttggtcaattttatacccccgttaattggattggttcgttgcctttaacagtttcaccaattttatatgccttgatattttgaccattaagtatttctaatgttgattcaacttggttattatcaacgactaaagtaaagccaatacccatgttaaaaatgttatacatttcatcagttgagatgtttccttgttcttgtaaccaatcaaatatagctggcgtaggaaattgcgtgacatcaatcttggctgttatcccctcaggtaaggctctaggtatattttcataaaaaccgccccctgtaatatgggtcatggcatatatcttaatagatgatttaacagctaacacgggttttacatataaacgtgtgggtttcaaaaaagcatctaaaaatgtctgttcttgattgaatggttcacttaatttaatacctgattgttgtattaattttctaactaaactataaccattggaatgtatgccactagattcaagacctataattgcttgtccaggttcaacagatgagccatcaatatagtcatccttttctactgcacctactgcgaagcctgctaaatcatattcaccctcgtgatacatttctcccatttcagctgtttctccaccgattaaagctgtattggtctcttcacagccatcacttacccctttgacaatttgctcaatgacttcaggaacgactttattagttgcaatataatctaaaaagtaaagtggttctgcacctgtagttaaaatatcattgacacacattgcgacagcatctataccaatcgtgtcatgtttatcgttatcgatggctaattttaattttgtacctacaccatctgtacctgatacaagtaaaggtgctttcatatttaactgtgacaaatcaaatgtagcaccaaagccacccaatccaccaagtacttctttgcgcattgttctttggacatgacttgtcattcgttctaccgcttcataccctgcattaatatcgacgcctgcttgttgatatgctttagacatttaaattaccctctctatcaaagtattgttgatgatttgctaagtacgctttttgacgttcacttaaatgcgctacataatcttgctcataatcatataaacctgcaggataatcacctgtgaaactttcaacacaaagtccactataaggcgcatcgcaatcaagtccaatagaatcaattagaccttcgactgttaaataagccagtgaatctgctccaatataatcactaatctcctcgggcgatttatttgatgaaataagctctgccgttgttgaaacatctatgccataaaaacttggaaacataaactcaggagaagcaatgcgtacatgaacttccttagcgcctgcgtctttcaacatttgtactatacgtttactcgtagtacctctgacaatcgaatcatctactaagacaatatttttatcatagacaatatcttttacagcagataattttacgcggacgccttgttcacgtaattcttgtgtcggttgaataaatgttcttgcaacatattgatttttaacaagacccatttcatacggcagtctactctcttcggcataaccagatgctgctgaaagtgaagaattaggtacaccaataaccatgtccgcatttgatgctggactttctttcgctaattgcttaccagactgttttctaacagcatgaacatttttaccggcaatggttgaatcaggtctagcaaagtaaatatactccatagctgaaatagccgtcgttgtatgacgcgtataagattcgactctgatcccatcatcattgatgactacatattctccagcatgaatatctcttacaaattcagcacctaggacatcgattgcacatgtttcactggcaataatatatgaaccatttttcattttaccaacagctaatggtcgaatcgcattagggtcaactgcaccatataaagcgtctttagttagtaccgcaaaagtaaatccgccttttatttttcttaaactttcttgaaaagcatcttcaaatgtaggtgctttacttctgcgtatcaagtgcatgataacttcagtatctgaagaagagtgaaaaatagagccttgatgttctaaagatttttttagactttgcgcattgataagattaccattatgacaaactgcaacactcatatcataaaaatgatataaaaacggttgaatattctctatacctttattcccggatgttgcgtatctcacatgcccaattgcatgttgatatgttttaaatgattccatttgtgtatctgatatcgcatctgtcaataaacctaaaccacgttcacctttaagcacttcaccatttgaacaaacgattccagcaccttcttgaccacgatgttgcaaactgtgtagtcccatataggttaattgagcagattccggatgattccatatgccaaacacgccacattcttcatttaatccgttgctgtcatacattgaggtatagctccttcccataaatcatttaaatgttttacatcacgcacaatttcgctctgttcatttgtcactttaaattgttgatcattagtcactttaccaatctcaacagcataatcgcagtttaatgattgaccattttttacgattacaatataacgtccttgtgtttcactaaacagttgcgcattcgtaacacttagtttcgcctgtaaaccaagttggtaatgtgcactgatacgagctaaagtaagcaataagccacctttacctactgtttgcacatgtgaagctaccccttctcgaattgcttgttttatcgattcacctttacgaacttcttgcgataaatcaatggattcaaattcatgattcacttgaccatacaacaatttctctatttgactaccaccgaaatcatcatttgtatcaccaacaacatataatgtatctcctacagaaggattaaaatgattaagataacttatgtcatcgatgagaccaaccatacctactacaggtgttgggaatatagatgtttctctcgtttcgttatataaagacacattacccgaaacgacaggtgtgcttaaaacctcacatgcttctgccataccttttgttgaatctgctaattgttgatatatttctttcttctcaggtgagccataatttaaacaatccgtcatagctaaaggcgttgcacctacagaaattaaatttctatacgcttcggcaacaactatctttccaccttcatatggattgttaaatacatagcgggcttctccatcaatcgttgacgcaatagctttatcagttccttcaacgcgcacaacagaggcttgtaatcctggcttaactatcgtattagcacctacttgttgatcatattgttcgtataaataacgcttcgaagctatagttgggtgttgtaataattgatcaaatacggattcaacatctacactgctatagtcatttttagtttcattgtattctggcgacgtaccttcaagtacataaactggcgcttcatcagataaaggttgaactggaatatcggcaaatacttcatcttcataagttaatacgaaacgatccgtgtcagttacttctccaattactgcactgtctaactcatgtttatcaaagaggtctaagaatttttgttctgttcccttttctacaacaagcaacatacgttcttgagtttcagataacatcatttcatacggtgaaataccttgttctcttgtagggacttgttctaaacgtaaatgtaagccactaccacctttagctgccatttctgaggatgatgatgttagtcctgcagcccccatgtcttggataccaacgagttcatcaaatgtgatggcttctagcgtggcttccattaattttttacctacaaatggatcaccaatttgaacagatggtcgtttgctttcactatcttcacttaattcttcagaagcaaaagtcgcaccatgaataccatcgcggccagtttttaaaccaacataaataacagagtttccaacgcctttagccgtccctttttgaaccatgtcgtgatcaataatgcctacacacatcgcattgacgagtgggttgccatcatatcgatcatcaaactctatttctccagcagttgtaggaattcctatacagttaccatagccacctatacctgcaacaacgccacgtaaaagtcgacggttttgtttttctgtcaattcaccaaaccttagactattcaataaattaattggacgtgcaccaatagaaacaatatctctaataatgcctcccacaccagtagctgcgccttggtatggttcaactgcagaagggtgattgtgtgactcaaccttgaacacaaccgcttggttatcaccaatatcaacaacgcctgcgccttctccagggcccattaaaacatgttcacctgaagttggaaattgtgttaaaaagggtttggaatgtttataagaacagtgttcactccacataactgagaaaataccaatctccgtaaagttaggttcacgacctaaaatatcacaaacctttgcgtattcttcatcacttaatcccatatccttgtacagttgttcaattttaatatcttcagaacttggttcaataaatttagacattttgttccctccaactatttaccattgcttgaaataattttacgccgctatctgtaccaagaattggttcaatagcacgttccggatgaggcatcataccacacacattgccctgttcattgataatacctgcgatatcattaaaagaaccattcggattattgacatattttaatataatttgattatttgcctctaaacgatcatacatatcttgagtacaataataatgtccttcaccatgcgcaacaggataaactacagtttcatcctcattatataaatttgtgaatgccgtattatgatttaccacacgcaatgattcatttcgactcacgaataaatgagaatcattatgtagtaaagcacctggaagtaaaccaatttcagttagaatttgaaacccattacacacaccaagtaccggtttaccttctttcgcaaattgttttactgcttctgtaattggtgcaacacttgccattgccccagaacgtaaataatcaccaaaagaaaaaccacctggtatcagtacaccatcaaaaccgtccaacgatgtatttctataatctacatattctgcttctacatctgatttcaatgcagcattatacatgtctctgtcgcaatttgatcctggaaatttcagcactgcaaatttcattatgccttctctccttcttccaatactttatagctatattcttcaataacagtattagcaaaaagtttttcacttaacgtagttacaacattatgaactgcttcgtcagttgcttcatcaacagtcatatagagtactttaccaactctgatatcattgacttgcttatatcctaaatcatgtacagctcgatttaatgcttgtccttgtgtatctaatacttgtggttgtaatgtaatatgcaattcaattgttttcattgttagagtgcctccaatttatttaaaaaagtctgatatgtctcgataattgatcctgtatcttctcgataaacatctttatcaaaatttgtatcactttgtttatcccaaattcgacatgtatctggagaaatttcatcagccaataaaatttcaccttcatttgtgcgtccgaattcaattttaaaatcgactaatcttaaattcattttgtccattaagttcactaatacttcattaatttctgttgctgcttcttttaatttttcaatttcaccatcattagcaatttgaagtagtttaatatggtcttcagtgataagggggtcgttcaaatcatcattcttgtagaaaaattcaactaatggtgtttcaaatgtatgtcctttttcaaaacctagtctttttgtaattgagcctgctgcaatatttctaactacaacttctaaaggaatgatttcaaccgaattaactaattgttccgtttcagatatttgctcaataaaatgactattcaagcctttagctttcaaataattaaatatacgagaggtaatttggttatttaagcgtcctttcccttcaatgaagtcttttttagcaccattaccagctgtcacttcatctttatattcaactcttagtacatcagacgttcctgttgaaaaaattcttttagcctttccttcatataacaaagacatatatttatctcccttcaaattgtttaagcaacttttgttcagtttcatttatatcattagttaacaccgttaaatgtcccatcttacgattaaatttacgttcgtttttgccatagatatggacatgccattcagggtgttctgcgaattgatcttctaataaatctaaatctctgcctaataagttcatcataatcgccggtttcaatagtgttacttgttgtggtaattgttgtcctgttattgccttaatatgtgtatcaaattgagaatattcgcaagcttcaattgaataatgtccggaattatgcggtctaggcgcaatttcatttacatatagttgattctgttgatctataaaaaattcaactgtaaatgtacctataaaatgtatggctttaattattttatttacttcattacgcgcttcttgctctttattatcttgtactcgcgcaggcacgattgttttaaatagtatttgattttgatgttcattttcttgtagagggaaatatgtgatctgattgtttgtaccgatggttactgtcaaagaaacttctttacttaagtttaggtactgttctgctacacattcttgtgcttgaatcagttgacgcgcttcatctaaatgagtggcgtctttaacaagcacttgacctttaccgtcatatccaccgaaacgtgttttaacaataaaaggatatccaattgaatcaaccgctttaactaaatcgtcatagtcagttaattggaggaacggcgctatattactgccagaatcttgtaaagtttgtttctccgtcaggcgatcttgaagtaattgaatcgcttgatagccttgaggaatattatattttgaagctaatgcttgtaattgattagccgagatattttcaaattcgtacgttattacatctgataatgctccaagtcgatctagtgctatttggtcgtcatacgcagcgttgatgaactcgttggcaacatactggcaaggacatgatgaattgggatctaacacaatcactttgtatcccatttgttgggcagactgcgccatcattttgcccagttgaccgcctcctatgatacctatggttgagccgaattttaatttactcaagttcatcttgcatatcactcactttctcaactaaagatttttcataattttccaaattcttttgcactgtttgattaccaatactaagtattcttgcagccaagatacccgcatttttagcgccagctttacctattgctgtcgttgctactggaataccacctggcatttgtacaattgacaatagcgaatccattccttttaaacttttagactcaataggaacgccaattactggtaaagtcgtcattgacgcaaccatacctggtaaatgcgcagcaccgcctgcaccagcgataatgacatcatatcctgcatctctcgcttctcttgaaaattcaaacattaattgaggcgtacgatgtgctgaaactacttttttatcatacggaatttcaaattggtctaacatcgaacaactttctttcattgtttcccaatcagaagaacttcccataatgactactactttcaaaatgaacaccctttcagaaatttgaaatgatactactattagatgtatattacagatatagcataacaagtaaatgatgctttttcaatcaaaaatcgaactttaatactttttttttgtttaatctacgtcttttggttgttaattatcccatcatttgtgttaatgttaagtaaagttcaaacattcaaggaggattttttcatggtcgcaaaaattttagacggtaaacaaatcgctaaagattacagacaaggacttaaagatcaagttgaagctttacaagctgaggggtatacaccaaaattatctgtcattctagtcggtaatgatggtgcaagtcaaagttatgtcaactctaaaaagaaagctgcggaaaagattggaatgatttcagaaattgttcatctcgacgaatctacttctgaagcagacgttttaaacgaattaaaacgcttaaatgaagatgatagtgtgagcggtatattagtccaagtaccacttcctgatcaagtaagtgaacaaaaagtattagaatctattaacccagcaaaagatgtcgatggcttccatcctgaaaatattggtaagctttatattgatcaacaaacatttgtaccttgtacaccattaggtatcatggaacttttaaatcatgccgatattgatttagaaggaaaagacgctgttgttatcggacgtagtcacattgtaggtcaaccagtttctaaattattacttcaaaaaaatgcttccgtaacgattcttcattcaagaactaaagatatgaagcgttatttaaaaaatgctgacatcattgttagtgctgtgggtcgtcctggattagtaacaaaagaagacgttaaagaaggcgcggttgtaatcgatgtagggaatacacctgatgaaaatggtaaattaaaaggtgatatcgaatacgatgaagttaaagaagtggcaggtgcaattacacccgtacctggtggcgttggcccaatgacaattacaatggtattaaataacacacttatagctgaaaaaatgcgtagagggattgaataaactcgcgagataaagaatcaatttttttgatatttatataaataaaatgctttactgcttcattaacaaaacaagacacgttaagttcaatacgacttaacgtgtcttgttttttgttaatttatattatttcattcaattatataacactttatacaccaacacttaatttagggataaacgattcgaaatgaattttcgtttcatcaacttccatttcttttaaggtagtgatgatagattgaaggaaattaacaccaccacaaacataaatttcagtatcttttgttataaattgattcaaatacgatgcatccatataacccattttatgcttatcataaataatataatcgttattctctttactttcagctattgcctctagtttatttgagaatggtatatctgtatcattaataatattttgaataaattgaattggcgcttctgacttagccacttgattaaacattggaattaaaggtgtaaccccgataccggatccaataaatagttgtggtgactcactgttgaccacggaaaacggacctactggtgctgataattgaatcgtatcgccttctttgtattcactatgaagtatcgtagacacttccccttcatgtgttgttgttacatcatgtttaactgcaaaagtcagtgtttcactatcaccttctacaattgaataatggcgtttagcacggtatggtagtgacgcactcttcacatcgaccgtgacatattgacctggtttaaatttactcatgtctatttcatcagatttaactgtaaatgctttgatgtctgtagctacagtttctatatttttaattacaaatgcttggaaaccatcccatgccattgttttataaatatctttttcaacttcaataaatactttagcaatttctccgtatgctttagcccaagtgtctaagattgcatcatcatccgataattttaaaacattttggatggcagctaataaattttcacctacaatatcataaccagctggcggcacctgtaatgcacaatgtttaaatgcaatttctttcacaactggtaaaatacgtgtcaaatcatcaatattcatcgctgcagctaatacactctgtgctaacgccgttgattgcaatcctttcttttggtttgtttgattaaacatattttttaattcagggtgctgtgtaaacattctattatagaaaaacgatgtgatttctacccctctttcttgcaataccggaaccgtttctttaataatcgctttttctttttcattcaacataataagcacttccatttcttcaaatatagatttatcatttctgctttattttattacaaattattgtatttcaaaacaaatttgtgataaaattcacaaaaagttcattttacttaattttaactaaaaattacaattatatttaaataaataaggtatattaggactatagtatgatgtaatacacagcgcattacagtatagtatagataaatcaattaaagtctcttcttggaggtcaataaatgaataaacttatacaatcgttatcagcaattggcgtttctgcaactcttgtatccccaaacctaagtgcagaagccactgacaattcaattccagagcttaaaggtacgaatgatacaatcatagataaaggtgaagaatataatcttttaaatggtgtacatgcatacgataaagaagacggcgatttaacacataaaattaaagttgatggtaatgttaatatcaaccaagctggaaaatacaaaattgagtataaagtggaagattcaaacggcgcatcaagtaaatcgatacgttatatagaagttaaataaattaaaattccatacatagcaaaaaccaagctaaatgataacctttatcactacttttttgataaaatcaccctttcgccttaaatatgacacttttcacaaaatgtacacataattttaacaaatctttgaaagcccaccagacgttgagtttgttgggtttcttttaattttacaatatttttttcgcacaaacacttgtaaatattgcgtaatatcttaaaattgatgttaagccctacatttgtagtattaggaggtcaaaaaagtgtcaaaatttaagtctttgcttctactctttggctcgctaattttacttagtggctgttctaacgtagaagttttaaacccaaaagggccgatggcaagtgattcgaagtttttgattatgtattcaattatcttcatgcttgttattattgccgctgtacttattctattcacagtttttctatataaatatagaattggaaacactgatgaatcaggtaagatgcaccacaattctttattagaaacaatttggtttattattccagtaattattgtaattgcattagctattccaacagttaattcactttataattacgaggaaaaaccacagaaagaagacgatccacttgttgtttatgctacaagtgctggttataagtggttctttagttatcctgaagagaaaatcgaaacagttaaccatttaactattccgaaagatcgcccagttgtcttcaaactccaatcaatggatatgatgac

SEQ ID NO: 23 - DNA, 29492 bp, Staphylococcus saprophyticus
  misc_feature (14031)..(14031): n is a, c, g, or t
  misc_feature (14082)..(14082): n is a, c, g, or t
  misc_feature (14109)..(14109): n is a, c, g, or t
  misc_feature (14136)..(14136): n is a, c, g, or t
tggttggtacacttagcgatgtgttaaataactctgtggaggtttataatcaatgaaaaaagtgatgctaacagcagctttaacaggtgctggagatactacagcaaagaataagtgtgttcctgtaacacctcaagagattgctgaatcagcaataaaatgtgcaagagcaggcgcgacagttgcacatattcatgcgagagatccagagacaggtggtattagccacgatgttgaatttttcaaagaagccgtacgacttattagagctgcagatgaagatattattataaatattacgtcaggtggtggcggagattttattccaaaccttgaagatccatatctcgctgcagaaggatctgatatacaaacaccagaagaaagacatgaaccgataggcagcttactacctgaaatgtgtactttagattgtggtagtgtcaacatgggagatacagtttatttaagtccaactgattggttaagaaaacaagctcaacttgtaaaagaggctggtgttaagcctgaattagagtgctttgacagtggtcatatttcattcgctaagcaattaatcagtgaaggattaattgatggtgaaccaatgttccaattttgtttaggtataccttggggagctgaaaatgatccagaaacgatagaatactttaaaacgcgtataccggagcatgcccactggtcagcatttggtattggaagaatgcaatttccaacggttgaagaagcagcaaagcgtggcggcaacgttcgtgttggattagaagacaatttatatttagccaaaggtgttaaggcaacaaatgagcaattagttgaaaaagctgtcgaaatattgaacggattagatatagaaccaatgaccccggcagaagcacgtaaaaaatatcaattaagagatccacaaggaggagcataatgaagtttgcagttgtaggtacaggcgttatcggaagtggatggattactagaatgttagctcatgggcatgaagtcattgctacagacccaagtgaaggcgcatatgaaagaatgttaaaacaagtgaaacaaaattggccatatgcagaacaattaggtttagcagaaggcgctgcaatcgataatttaacatttacaccttatttggaagaagcggttaaagatgcagatcatatacaagaaaatgttccagaaattgaatctttaaaagatcaagtgctgacagaaattgatttttatgcgaaaacagatgcaacgattggttcgagtacttctggtattatgccatcagaattgcaacaaaatttacaacatcctgagagattgattgtagcccacccatttcatccagtttatattttaccgctcgttgaaatcgttcctggtaaagcaacaacggaagcaacaacattaaaagctgaagaaatttacgaaagcattggtatggatgtacttcatgttagacatgagattgaaggacatgtagcagatagattaatggaagcactatggagagaggcattgcacattgttaatgatggtatagcgacaacggaagaagttgataaagcatttacacatgctgcaggtttgcgctatgcacaatatggtccattcatgactttccatttggccggtggtgaaggcggtatgcgtcacatgctgaaacaatttggtccagctttaaaaaaaccatggactaaattagtagcaccagaattaacacaggacctgtatgacgaagtggtcaatggctgtgaatcatcttctcaaggacaaacaatggcggaacttgaccaaaaacgtaatgaattcttagtaaaagtaaaacaagttgctgagtcatattggccagaagatacaccctctatgaaaaagaaaacacaacaatcggtgaaataaaatgacaaacaaattatatgaatacaagacgcatgtaaatgaagcttggggcgaccataatgggcatatgaatgacgcagaatataatcgtgtatttagtgatgcaacggatgcatggctcgcatttttagggttagatgtgcaaacaattgaaacgttggactacactgtctttactttagaaaaccacgttatgtatttaaaagaaattaaagtaaatgaagcgattactgcttcagttgagttatttgattacgacgccaaaagattacatgtgtttatgacattaagtgatgaagcaaatgataagtgtgcaacttatgaggttatgttaatgggaatgaatactaaattgcataagcctgatgcttttcctactgatatacaaaaagcaattgatgattatgcacaacatgcttcaataaaaaaacaacccaaagaacttggacatcttattggtataaaacgtaaataaaatttttgaatgagtttgaaacgattgaataaaaaggtgttaaaaatattttatataaccaaatatttggttataaattgtttaatgttatttattaatgtatcttgttatatatagaatgataaaatcaaagctaaattgattattctgttttgattgtttacacacgaataaagtagggctatgtgtgctcatgtttttacttattttttagtatttgtataacatccacagatagtcctatatttattatgaaatattttaaattgaatatgtacatagaaaggaattgactcatgttaagtattaaaaacttatctaaagtctatggtggaggaaagaaagctgtagataatatttcacttgagattgaagccggtgaatttattgcatttatagggacaagtggtagtggtaaaacaactgctttaagaatgatcaatagaatgattgaagcaactgaagggcaaatagctataaatggcaaagatgttcgcaaaatgaacccagttgagctacgtagaaaaattgggtatgtgatacaacaaattggattgatgccacatatgacgattagagaaaatatcgtattagtacctaaacttttaaaatggtctcaagaaaagaaagagaaaaaagctaaagaactgataaaattagtggatttaccagaagaatttttagatagatatccttcacagctctcaggaggacaacagcaacgtatcggtgttgtgcgtgcgttagcagcagaacaagatatcattttaatggatgaaccatttggcgcgttagatccaattacgagagatacgttgcaagacttggttaaagaactacaacaaaagttaggtaagaccttcattttcgttacacatgatatggatgaagctattaaactggcagataaaatttgcattatgtctgagggacgtgtcatacaatttgatacgccagacaatattttaagacatcctgaaaacgatttcgtacgagactttattggtcaaaatagattgattcaagatagacctaacatgcgtacagttaaagatgcgatgattaaacctgtaacagttcatgcggatagctcattaaatgaagcagttaagattatgagagatcgtcgtgttgataccatctttgttgtgggtaacaatcgtagattacttggatatttagatattgaagatatcaatcaaggtttacgtggaaataaagaactgattgatacaatgcaacgcgatatctatcgcgtaagaatagacagtaaattacaagattcagttcgtacaatattgaaaagaaatgtaagaaacgtacctgtagtggatagtgatgaagaaacgttaattggattggttacgagagcaaacttagtagatatcgtgtatgacagtatctggggagaaacagatgaagacgatgatgctacacaagacgcaattgttgagcccgataatgtaggagctgataagtaatgaaacaattcatagagcaatatggtgggcaactgatttccaaaacagtcgaacacttttatatctcaatgatcgctttgttaattgcaatcgtagtcgcagtaccattaggtattatactatccaaaatgaaaagaacttcaaacattgttctcacaattgctagtgtattacaaacgataccaacattagcagtattagctgtaatgataccaatctttggtgttggaaaattaccggccattgtcgcattatttatctatgtactactaccaatattaaataacacagtattaggtgttaagaatattgatagtaatcttaaagaagcagcaatcagtatggggatgacacgctttcaattaatgaaagacgttgaattaccattagctttaccattaatcttgggtggtattcgattatcatctgtttatgtcattagttgggcaacacttgcaagttatgtaggtgcaggtggcttaggtgactttgtatttaatggattgaacttatatgacccattaatgattgtgagtgcagctgtattagttacagcattagcattaatagtggatgtactattatcattagtagaaaaatgggcagtacccaaaggattaaaagtatccagataatttaaggaggacattatgaaaaagataaaacagtattgtatcgtgcttgtactgtgtctgacggtgttatctggatgtagtttacccggtttaggtggaaatagctcagacaacgaggtcaaaatcacagcacttgcaacgagcgagtcacaaattatgtctcatatgttgagactattaatagaacatgatacagaaggaaaaatcaaaccatcattaattaacaacttaggatcgagtaccattcaacataacgcactcgtaaatggtgatgcaaacttatcaggtgcccgttataatggtacggatttaacaggtgcattaaatgaagatcctattaaagatccaaaaaaagctatgaaagcgacacaagatggtttccaaaagaaatttgatcaaacattttttgattcatatggatttgcaaacacttatgcatttatggtaactaaagcaactgctgaaaaatataatttagaaactgtgtctgatttaaaagcgcatagcgataaattgaaactaggtgtcgatagttcatggttaaaccgtgaaggcgatggttatccaggatttacgaaagcatatggctttgattttaatacagtacgaccaatgcaaatcggattagtatatgatgcattgaattcgaataatttagatgtagcagtcgggtattcaacggatggtcgaattgccgcatatgatttaaaagtattgaaagatgacaaacatttcttcccaccttatgacgcaagttcagtggcgacaaataatttattaaaacagcatccagaattaaaaccaacaatagaaaaattacacaataaaatttcaacgagtgaaatgcagaaacttaattatcaagctgatggtgaaggtcaagagcctgcagtcgtcgctgaaaaattcttaaaagcacataactattttgaaaatgataagaaaggtggtcattagtaatggaaggtaatttatttcaacaattaattgaatattattcagtaaactttggctacctatgggatttatttattaagcatttacttatgtctgtttatggtgttctatttgcagctattgtaggtattcctattggtatcgtcattgcaagatataaaaaattgtcttggacaattattaccattgcaaacatcattcaaactgtacctgttattgcgatgttagcaatattaatgttagtgatgggactaggtcctacaactgtagtggtaacggtattcttatacgcactattaccaattataaaaaatacatttactggtattgttggtgtcgatgaaaatattaaagatgccggtaaaggtatgggaatgacgcgcaatcaagtcttgcgtatgattgaattaccattatctttatcagtcattcttggtggactgagaattgcgcttgttgtagccatcggggttgttgcagtcggctcattcataggtgcgccaactttaggtgacattgttattcgaggtacgaatgcaacagacggaacaacatttattttagctggtgcaattccaattgctttaattgcaattttaattgatatcttcttaagatttttggaaaaacgtttagatccatctaataaaacgcataagaagaaaaaacacgaaacacaaagtattaattaataaaggttgtgactgactttggcaatattatcaataaactataattcgacgacgattggtatgcatcatccttttatagtgattttacctgaagacgctacttattttgattcaaatgcacaaccgaaagcgttgaaaacgttattgcttttacacggactttcaagtgacgaaacgtcgtatatgcgttatacgagtattgaacggtatgcaaatgagcatcaattagcagtaatcatgccgaatgcagatcatagtggttatagtaatatggtgtatggtcataaatattatgattatatacttgaagtattggattatgcgcatcaaatattaccactctcgactagcaaagaggacaattttattgcgggacattcgatgggtggctatggcacaatcaaatatgcgctgttagaaggtcatcgttttgcgaaagcttgtcctttatctgctgcatttaacgcacaaggtttgattgattatgattggtatgattattctggatttgcaattgctggtccaaatgcacaagtagcaaatacaaacttagatccgtattatttagtggatgaagcgattaagaaacaaaaagaaattcccgaattgcttatcatgtgtggtacagaagatgatttataccgagacaatcagcagtttgtacaatatttaaataaacgccaaataccaaacatatttgaagatggacctggtgaacatgattacgcatattgggataaagcgatacaacgtgcaatcaagtggttcatagaaggaatatagaaaatcaaattggaatgatatgagtcacaaaaaagcatcctcatagggggatgcttcagactgtctacaaagtctccgactttgttggcagtttttttatgcacgctttccgcgggcactgccttagcctgtagtcttcggctagtgctattcccgcaggagtcggcataaatcactgcctaaattataatatataaattaaacacattaatagggattgattcctatctacatattagttccaaaaaatcatttgttaattatagtctatttagcattatatttagattttatttatgaacttatcgaagacaaatattgtcatattaatagcagtccatctaaagtacctgttattttactaaaatattacttatacaaagacaattaggaatcaaaaataagaaaaaaattaaaatagacaaaccctgcacatttattgcgcaatgtttgtctatgtcttgagggagtaggacagaaatcaaatttttcaattcagtcatctactgcctaaacgaaaaagagtctgagacaactattatgtccagactcttttttacgtatattagaaaagtttaaactaatttacagtataattaaatgatttaaattcttcttctaatttacctaaatgtcttaaggtaggtgtcaatgctgcaaagaaaaatccttctttcaacttacgtgcttgtggtgctttaggagagtatgctcttgaaccaccattgaccatagacgcctgattaacttctaatagtaaatatccagcttcttttttaagtcgaataagttcgccaaattgattatccaaatcattttttgcaacaaggttataaaagtcttgcttgatctgtttatagcgtgattcaaaatctgaaatgtcgtattctaaatatttattgatgccattttgtgcgtcagagaatttatgaattaaatcaagtgaagcacgaacggaacctagggcaataggaacttgtagtgttacaaattttggtcgaatatctgaggcaaatgattttgcgtcatgcgtgatgatttgcgtgtcaggaatcagtacatcatccatcgttatcgcaaatgttgctgaaccattgacacctaagaaattcgacttctcatcaagtataataccatcttgattggcatgtacaataaacattactaattcatcatcagtttcagactttgaaatggccccaaagtagtgatcagaaccgatattgcttactgctggaagtctaccgtttacgtaaaattttccctcttgataatggtgagataaattgaaagactctaaatcattaaatgatttcataggatttgataaaccagttgcgcctaatatatcaccatttaataatgattgttgtaaatcatgatttaaatgcgcttggtcagcattttctaagtatgttgagaatgcgagttggcaccataagcaaaatcctgtagttagacaagatttggatacttcttcaataatttctaaattatttttcaaatcattttctttaaaataaccttctttaaataaagtttgaataaattgtttaggatagtgtgtaccttcatctatttcaattaaatatggatctaattcattttcgataagtgtttgtaaactcataataacgtctcctttattctccgaatcgttttagaattaatttttctaaataactaataaatctatctataatgaagccgaacaaaccaataaaaaatattgcggctaatacatcttctaagttcaacatatttcttgcatctactatcaaaaagcctaatccagactgggcaccaatcatttcaccagaaactaaaaatatccaactcgtacctacagccatatgaataccacccataatatgtttgaaggcaccagggaataagatatttttatataattgccaacctgttaagttaagatttgaagcgatttttaaatattgaggttcaatatgtctaatgcctttaattgtgttaaaaacaatcggaaagaaagcagcgataaaaataattgccatagctggtaagctaccgataccaaaccaaagtacaacgaaaggtgaccaagcgataggtgatataggtctaattaattgtaaaagtggttcgatggcatggaatagtgcatttacacgacctaataaaaatccgataggaacaccgattaaaatggcaagaacaaatccgactatgaaacgaaataaactaataaacaaatgagaaaatatttccccggaaatgatgaactgccaaatgctcttagcaacaagtaaaggaccaggtaagaggataggttgataatttcctatccaaatcacgcattgccatataaataagaaaatgatgaaactaataataggtaaagtgaattttttagttaatgcatgtgtcaatgcgtactagccctccttgtataatgttggatcaacaaaatctttatagtcaggtgtgttaaataatttatgttctttgactaaatgagtgattttattatagccttctttttcaattgttaaatctccataagaagtccaatctgctgattgttttaaaacttttttatcttgtttaaaatgtttactcatgacttctacgctttgctttttattgttcattttataaccagcttttttataatcagtcataaaagcttgtgctgtatgatggtgttgattgattaaatcctctctgagcacaagtgcacagcaatatgcatcaggtatcacatcgctaccatgttttagcgtatgtcctttgcctagtttttctcctaaggcaccaaaaggttcagctactgagtatcctgaaatacgattttcacttaaagctgcgggcatttctgcaggtgccatttcatgataactaaaggtatcagagtctaaatgaagttgttttcgcatttcttctaatagtaggtaatgtgtcgaataccgatgtggtatcgcaaagctataatcttcgtgattatggaagtctgaaattgtttcgttattttgtcccataatgacattaccttcgtgatggcctagagcaactgctttaatatttgaacctttctctttagatttcatcgcaagttcgattaaggtagatgcaccatcgattttgccactatttaaagcgtccatcaggtcaggccaattattaaatcttactagttctaagttgtaattcgcgtttttggtttgttgctgtatttgttgggtcatcatcaagtttgctgaatgtgtaataggtaaataaccaatttttatagtttcttttttatcggattgtttttgactattactttgtgtacaagcagaaagtaatactaggaatattagagaaaggattaataattttttcaatatgctgcctccttataaataatattccggttctgccatataatgatttaaggcaaacttttccatgatagtattacggatatttaataaatggctatcattgcgattacgaggatgtgattgcttaatcttatattgatcgataatttcacaaccctctccaagtaaaataatattgtcagaaagatataatgcttcatctatatcatgtgtgacaagaataatagtagcgtcagtttgatgctttaattgaatcaattgatcttgtagtttataacgggtaaatgcatctaaagcaccaagtggttcatccattaaaataactttcggttgatgtacttgtgctctacaaagtgcaacacgttgtttcatcccaccagataatgattcagggaatgctgagcctttattatttaaatcgacactttttaaatgatggttaatttcttcattactcatacgcttatttaaaccaatgcgtatattgtcatagatatttttccatggaaaaagattatgatgttggaatatcatcaaacaatctggagatggcgtttgtttaatttgaccattgatattaacagaaccagatgagggtgttaagaaacctccaataatatttaataaagttgatttgccacatccacttttcccaataaaagtaatgatttctcctttatctatatttagttcgaaatcgttaatgacagtattctctccaaattgatgatgaactcgattaatatgaatcacggtagacacctcaattattcttatcgttttaataagaattgcgtttacactaaagggctatgcaagtacatagcccgtgaagtggttgtttatgaatttactttttagaaaatctagtgattaatcactttgtaaaaaggcagtagatgactggattgaattgcgcttatattaagcttattcaaccctagtcatccttgccggggtgggactacgaaatctttattaaaacaaatgatttctgtccctctccctaagaactactaatctcaattctattgagaaagtagttctttatattttttcgatgtcatcgattggtgtatctacagctttacgagcacggcgtacagcgtcttcatctggcgcatcgtacatacaaatacattttgtcatgtcttcacaaacatacgtacgttggaattgtacttccggtacttcttcgtagtgaactgaatttttcttcttacgtgctaaatattgatccattgtaataccttctgggatattccaagttacaaggtagtcaattttaggatcgccttttttaacttcatccagttctttaccaactagacgcacttctttaactaaatttatattaattgaagcatcttctagaaattgttttgcttcagtatcattatttgcttctacaataaagtaaccatgtgttaagtcttcagtagcttgaacttcaattaaagtaggtacatcaccagttgttaattgagcagctttatcttctaattcttttttatttgaggcaaaagccaaatcgtttgcttctagtaaaaataatgtcataaatcttaacctccaaatattaatagtaggtgtataatacaataaatcttatcagattacaaggatatgaaaataagtaatttaaattttctgataaattataaaaatagtatatagttagcggttaaattgtaatgggtgcagtaaggtaagaaaatatacgtgtatagatttaagtttttaaaaaataaacccgcacacgtcatttaactttatacgtgtgcgggttattaaattataatagtaatgttgctaatattggagctacgattacaacaatcacaccaacaataactagagaaatagacgccatagatgcttcagtttcaccaaattcttgtgcagaagaaacacctaacgaatggccacttgtaccaagtgctaaaccacgtgcaataggatttgttatattaaataacttaattaatttagatcctaaagcatatataatcacaccatttaaaataactgctagtgatgtcaactctttgatgccgccgatatctgcagatacgggtaatgcaatggcagttgtcgcaccttgaggtaacatagatgctatgatgccattagaaaattggaatgcttcggcgataagatagatacaaacaagtgcagcagttgtacctaatgtgatgccgcctaggatttgtttccaatattttttcaagacatcgcgacgtttatataaaggtatagcgaaacatattgttgctggttctaagaagaaattaatgatatcgccaccgattttataatttgcgtaatcaataccagttaattttaaaaaggcaatgccgacgaccatgctgacaaacaatggtgtgaacaagaaaaagccatttgtctttttaaataaaaaagttgcgatgataaaaggtataagtgatagtagaataccaaaataaggtgtattaatcgctaaatgttcaatcataatttatcctccgccaatttttttgttttgaatttttcggaataaaggattttgtaataagcaactgagataaaaatcctgtacataacaacaagagcaatgttgaaatgataattaataatataattaggattggacttgtgcttaatatgcctaatgaattaatgactgaaacacctgctggtacgaataagaaaccaatgttattcgttaatgtggttccaacagtttctacttggccaagttttacaataccagtacataaagcaataaataataggacaagtcctattactgaagctggcattggcaccggcatgaaactttcgatgatgtttgaaataaacataataatcgctataacaagcgcttgatggaaaaaattatatgttttagagattttattgtgcgttttgcgttgttctttttctactcccatttaaaattgcctcccaaaatgatcttgagttaattataaaatgaaagcgattacgatggagcgtttttgatgtgacttacgacacgttagagctgaaatgcataaattgaaatgtgactatcaattaagccccatcatttgtttgaaagttttcatataggagcggctaacctgaaaccttaattgatttgtcatggtaagttgatacgtataattgaaccaatgttcaatggtttgaatatgggatttattaattaatgttgcacgatggatacgcatgaaattttgcgtttcaattttcttttcataatgactcaaaggctctgaagtttcgaaatcgtcgagtgttgtattgattgtagtaataccattgttgaccgaaactgcaataatatcatctaagttaataatatgaatgcgttcatttacctcaatagggagcactttacttgtttttgttttttcgttgttttgagtatccatagaagctgttgtataactatcactatgatgttcggtagtttgccccaaagcttgttctactttgtgaactgcttgtgcaatacgttgttgctcaaaaggtttaaggatataatcgatggcatccaattcaaaagcctttacagcaaaagtatcatgcgctgtggcaaagatgataaaaggcgcatgtttcattttctttattttgttggcaagatcaagaccactttcgtccattaaattaatatcaagaaaaataacatcataatcatcataaagtaatagttctaatgtctcagaaacattttctgcttcatcaattttnttcaaatggtttatttgatttagcaaatagtgaagttcattacgtgctaanggttcgtcatctacaatgattgctctncatttttttcctcctctaaattatggntacggaatcgtacaactcacttgtgtgccttggtgatcggaatgaatttgaagacttgcttcataaccaaacaatccatctaatctgcgatttaaattttctaacgcgctgcctgtaccagattctgaatggacactggttttaccaattttatcaagtttttcataagggataccatgaccattatcggatacggaaatgactaaacctgtttgagctttgtgtgcttttacgataatttcgttattgtatttcctatttttaaaagcatgcttaatggcattctcaacaagtatctgtatagcaaaaggcggtacaagtgcgccgtaacaagtacgatctatgtcaaacgacacattgaagcggtccggatatctggcttgttctagagataaataggattctacttgttgtaattctttttctaaagaaatcgtgttattacgcgcaccttgtaaattagatctgaaaaattgactgagttgtaaaagtaattcacgtgctttttcactatcaatacgtactaatgcagaaatggtattaattgcattaaagaaaaaatgtggattaacttgtgcttgaagtgatttaatttcagcatcacgtattaaggcactttgtgtttcagcttgacctaattcaagttgactggaaaatatttcagcaagtccagttgctaattgtttatctgaatagttaacatcatatttatttgtaaaatataattttaatgtcccgacaacatcattcttgacgcgtagaggtactacgattgctgcttctaaagggcatcctgggtggttacaaccgatttcttcactagaatatgcttcttttaaagtgccagattgaatggctcgtttagataaattagtaataattgctttttgggcaacatgatggtcgctcgctacgccaacatgagtcaaaatatctttacggttggtaattgctaccgcagatacgcgcattaaattaagtataatctctgctgcttttttcgctgattgctcattcaaaccagagcggaaataaggcaatgtctggttagcaagctgtaacacatcatgtgtttgtatcgcacgcgtttcttcctcttgtttaatagtagataaaataatagataaaaatattgctgtaccgatggaattaatcgaaatcatagggatagcgatgagttttactaatgtccacgcatgttcagtattatcagaaaataaaagaatacaaagcatttgaattatttctgttgtaccaccaatgcacgcacctttgactatcgtaggataacggttagcacgcatcgctttatagccaaaatagccagaaattaaagcgatgaaaatagatgaaatcaagtaaatatatgcatcagcaccaccaatgtaaacacgatacatacctgaaatgacggcaactgctaatgctacaaatggaccaccgataagtcctgatacgccaatagtcaaaacacgtgtatttgctaaagaagcatcagggtctagatggttataaacagttccattaattatttcatcgcctcggatttgtataccagtgaagtttgaaatcatagagaagcaaccaaaaataataattaattgccattgtgaacgtcgtttctcgcgctcattcatcattgttttaaaatggttgatgttcattagtatataggcaataagtatgattaagcccacacgttcaagaagtagtataaataaatttaacataatacacccttatcatagtttgtcttaatatagtatacagaaattttttagctatatgttattgcagaaaagtaattatcattttaagcgataaaattttagtataattcgatgaattttaaagagaatattactctttgagtttacaaatatacatttaacgctgttttttagcaatatctatagctaagtgttattttgttaatattgggtttttaaatattttgtgaaaacgaaagaaattatataataaataattgtctgatgttttcacaaataaataaagcttaatttcattttaaaagattcattttgaaatagatatagacttttttagaatatgtttaatttgagtttaaaaacgtgtatatcttttttgaagtgatgcaatgctttttgggggatataggaggaaaaaagaatatggagtcatcacaatcatttgaaggagataataggcttcttgtaggtatatttttaggagttattacattctggttatttgcacaatctcttgtaaatatcgtaccagatcttcagtcatcgtttgatacaaattatggcacaattaacgtggcagtaagtatcacagcattattgtgtgggctgtttgttgtcggtgctggtgggctagctgaccgatatggtagagttaaaatgacatatataggattgattttaagtattgtcggttcattactgattattattcctggatttataccattgttagtagttggtagagccatacaaggcttatctgctgcgtgtattatgccatcaacgttagcaatcattaacgagtattacataggaagccgacgtcaacgcgccctgagctattggtctattggttcatggggcggtacaggtatttgttcattattcggtggcatggtgtctacctttgtaggttggagatcaatttttattatctctattattgtggcactcgcagcgatgtatttaatgaagcatgcgccagaaacaaaggcggttcaaacaaaagaaacgaaacgcgccaaatttgatacgattggacttattattttaattattgcaatgttgagtgtcaatttgattattacacaagcttcaaattatggtttattttcaccactcattttgtcattgatgttcatttttattgttgcagttattggattcttattttatgaaacaagaatacacaatccgctgattgattttaggatatttaaaaataaaggttacacgggtgcaacagtatcgaactttttattaaatgccgttgccggtactttaattgtagcgaatacttattttcaatcaggccttcattttacatcattccaatctggcgcaatgacgattacttatcttgtggctgtacttgtaatgattagagtcggagaaaaaatacttcaacacattggacctaaacgtccaatgttaatcggtgcagggttaaatgctgttggtattattttaatttcactcacattcctacctacaccgatgtatatcgttatgtgtatacttggttacttaatttatggtatcggattaggtatgtatgcaacgccatctacagacactgctgttacgacagcgcctgatgacaaagtaggtgtcgcttctggtgtctataaaatggcgtcctctttaggtaattcgtttggtgttgcgttgtcaggaacaatatttacggttatgacaaccactgcgaatatacatgtaggtgccatgtatggtttgttatttaatgcagcattagctattattgcatttttagctgttctattactcgtgcctaaacatcaatttaataattaaaatagaatgcaaactgtgatatgaattgatcctggaagcttatctttcatagaacgtcattgttattagagcgggacagagaaatcatttctagaagatttgattgctgttccgctctatttttattatcaagaaaatttaagaattaatagttaaataagtgtattgaaaaattttaatactaaatgcattgattatgaaattcaaaacggtttataatctagtaagcgcttacatatgggggtgatcaattgactaaattattatggcaaacatatgaagacagattgattttattaaaacgtttagtaaatcatcaaactgtgacgaatacggaaggtgaattaacatttccgagttttataaagcaattattattacagattccttattttgaaaaaaatcagtcacaaattttacttgagactacagaagataataaagaggccgttgtagccttttataaggcgcccacgacaactaaaacgattgtgttaattagtcatttcgatacagtagatgtagatgattatggctcatttcgtgaagatgcgtttgacccagataaactaaaatatgatttcacacaatacagcagttatttaagtacagatgctattgaagatttaaaaaatgacacctacctctttggtcggggcgtgatggatatgaaggctgggttaatgttgcatttatcattaatcgaattagcaagtatagaagtatgggatatcaatttgatattagtaactgtgccagatgaagaagtaaattcatcaggtatgagaaaagcagtggaaacgatagcttcaataaaacaaacatttcaattagacattcaactacatttgaatagtgagccaacgtttcaacaagcaagtgcagatgaacaacattatatctattctggctctataggtaaaattatgcctggggtattgtgctacggaaaagaaacacatgtaggtaacccattagatggtctgagttctaattttatgatgagttatatgaatcaagcaattgagtataaccatttatttaaagaagaatttgaaaatgaaacgacaccattgcctgtttcgcttatgacgaaagacattaaacaaacgtatgatgttcaaacgccatttaggacaatggggttatataacatgtttctatttaagcaaaagccagcggatttatatagacaatttatagatacggtcattcgtgcgacagagcgttgtgaaagtgattggttaaaaatattagagaacgaagacattgaatttgaaacaaaaatcaacgtcctcacctttgatcagttaaaacaatatgcgattaaacattatggcgaatcacgcatcgataaagaaatacaacaggttatcaaagaaacgccggggcttcatatgcagagcattcgtgtgacagaccgcttaatgcaaatttgtcgcaatatcgcacctgcagttgtgacattttttgcgacaccatattatcctgctgtaaatgtttcatacgatcaaaaaattgaggaaaccatcgcattagttaaagagacatttgaagaaaaatttcaatgtcagagtaaacgtatacattattttaacggtatcagtgatagtagttatttaaattttgctggagatatgtctcaaatgataacttacgaaaagaacacaccgaattttaatgcaacgtatacgattccatttgaggcgattaaagaaattagtgcgccgacattactttgtggtcctattggcaaagatgcgcataaagtgagtgaacgattgcataaaaaaagtgcttttgaagaattaccatttgtgttagagaaactcataaaatcatatatttaatttccgattatcatctatgggttgagtgtgatgtgggtattacgatatattaagattatatacaaattaggaaccatataattaaattagagaggtaatgctatgatagaggcgtataaagattattggaaaagatatatagattttaaaggtaaatcgaatcgtttagaattttggacgccagtattggtacatattatcagtatttttatcattgcgttgattggtgcgtttagttttattgtcggtatattcattgtagcagcagtattgtcagctttaatagggttgtttggattagctaacattgtcccgatggctgcagtgaccttgcgaagattttatgatgctggtcgaaaacggacaacagcgatcatattaattattctatctgtggtagttaatattgtctttgatattatccaagttgacagtatagcagtcttcttaaacattgtttcaataatttgtactattatattagtgatagaaacactactaccttcgaaaaatgtagaagatgcacaattaaaatggttataaaatataaagcatggagatggaaatcattatgatgaaatgtgattcctatctccatgttttttttattaataaaaatttgtgaaaagcacgtcttttcatttaaaaaatctgaaaattcattgtttttagacagaagaaaactataatataactgaaggagggattttatggaatggctaaaattaataggtattataattatcattttagggtttttacttaaaatagataccattgcagttattttaattgcagctgtcgtgacaggacttgtttcaggtttagatttatatgccatattagatacattaggaaaagcgtttgtagataatcgtttagttacattatttatattgacgttgccgatggtcggacttattgaaagatttggattgaagaaacaagcctctaatatgattggcaaggttaagcaagtgacgagtggtcgattactgacgatttatttaattattagggaacttgctggagtagcatcaattcgtataggtggtcatccacagttcgtacgtccattgataaatccgatggtatagggcgcactaaggacgcgttataatttaaatgaaaaagaaattgatgccaaagatattgagaaaataaaagctcagacatcggcaatggaaaactatggtaatttctttggtcaaaatttatttgttggtgcagctggtatattattgatggttggtacttttcaatccttaggtattaaagtggacgcagttcaacttgtattagcgtctgtaccgatatccattatcgtatttttaattgtatggataaataatatacggtttgataaatatttatataagaaatatggtacaaagcgggtgaataaggatgagtgaaagtattttaaatcatattttagaaattttttacatattaataggtctccaattactttatactgcgtttcgaatacttaaatcttctaagcatcataaaaagtatggtacggcattattttggattttattagcaattacatttatcgctggaccttatatacctaatgtctttaatggcatattcatattaatgatgggcggattgactttatttaaacaagttaccattaaaaatattgttcatgttacagaaaaagaaggagatatgggtgcacaaaaatatggtaataaattatttataccagcacttatattagcgattgctgctattgctgtctcaaactggacgccattgggtggcgcaattggtttgggcatttcctctatattgggactaattgcagcatatatggtgattaaacctaaagtgaaatatattttctatgatagcgatcgattaacacaacaaattggcacggtgggcatactaccacaatttcttgcagctttaggtgtgctgtttacggttagtggtgtgggagatgtgatatctaaaggcatttcgacaatactaccagaaggtaatcatttaattggtgcaacagcctatgtcttaggcatggtgttatttaccatgcttatggggaacgcatttgcagcatttactgtgataactgcaagtattggtataccatttgttattgcacaaggtggtgatccagttattgcaggcgcattagcaatgacaggaggattttgtggcacattattaacgccaatggcagctaattttaatacgttacccgtagctttgctagaaatgaaagaagagtttggtgtgattaaagcgcaagcacccattgcaataataatgattatagtacatatcgctttaatgtatgtatgggcgttttagaaaaaataaggttaagaagggaacatttatatgagaattttaataactggtttcgatccatttggtggagaacgcgttaacccagcattagaagctgtgaaattattacctgatgaaattggcgcacataagatagataagttagaaatacctactgtttttcacaaaagtaaagatgtcattctatctcaaatgaagcgttatgaatatgatatcgttttggctataggacaagctggtgggagatatgaattaacacctgagcgtgttgggattaatgtggatgatgcacgcattgccgataatgaaggtaatcaaccgattgatgaagtgatacaagttgatggaaatgcagcatatttttctaatttgccagtcaaacgaataacagaagcgattaaagcacagggtattccatcaaggttatctaatactgctggcacttttgtttgtaatcatattttatatcagctaggttatttacaagcaacagcgtttccaaaaataaaatttggctttattcatgtaccatttgttcctgaacaagttactgataaaccagaaaaaccgtctatgtcattagaaacgattcgaattggtttatatgctgctttagaagcaattgttgaatcaggagaagatataaaagtcgctttaggtgaaacacactaaataaaataaacaaataatgagaccgagacatgtatagatgccccggtctcattatttgtttattggaaaagtagatcaagcaatgattttgcgccgcttttttaatgatcatgttctgtacgtgtataatccatgcggacttcattataggttttaccaaagtatgttggctttttatgctcagttgctttaaagcctatttgttcatagaaatgaatggcatttgtgttttcttcaactacccatagcgtcacattatcaggataggataattctaatgcacgttgcgttaaagcgtaaccaatcatatgacgctgataagcttctaatagatataatgcataaatttcgctccagtcatctgattctgaaatggattctgttttaccataagtgataaaacctacgatttcatttttaacaattgctactaacgtaggtaagttatgcaaggaggacttcttaataaattgtgctttatcaagattttctagatagtcatttacagatatatggttataagtgctcaaccaactttcgtaatggacatttgctttgctatgtcgatcttcttcagttaaagctctgattgtaaattccatagaatgcctcccttacatactaaattgatattattatagcatcattatttttgaaaaagaaatttttcaattcaaaattgtatgtaattagaaatgggagatacattgtattaaagtataaacgattttatgatttcgtttcttcttttaattcatcttgaagtaatgaagcttcattgcgtacaattttgccataatatgcatgtgcaaaatgcatttgtatgattaagaataaaccacctactgtccaataaagtcctaaagcggaagcagattgtaacgaaatataagtgataaatatgggagatagtatcattaaaacatagtgcgtttttcgctgatcttttgggtagtgaatggcatttactaaagtttggaaaaaataaaccactgctgcaattaaagaaatccatagatttggctcagttaaattaaaccaaagaaaatgtggatggctgtcaatgcctccatcactcgggaattttaaagtgataattaaaccatataagataggcaactgaattaatataggtaaacaaccaatcatattttttaaagggttaatatcatattgtttatatgtatccatcaaaagtttatttgcttctagtttttcttcttgagttttagcaagctttacattttctttcaatgtatcaatttgaggctgtaccacttcagttttttcacgcatcatgtgcatattttaacttgcaataccataaaggggagtaagagcacacgtattagtaaaacaatggtaatgattgctaaaccataattttctccatacaaatggcctaaggcatgtaataacttatcgatgggttgtacgaatatcatattgaaaatgccttgatcatgattatgagtttgttgtgacttattgcatgcagttaggaaaaggggaatcgataataagaatagccactttatacgcatcattcatccctccaaattagtgttgatataaatataactttaacacaattgaatgagatttttaagtatttttaaagtagtaaaaatcggaagcattatatttatccataagtataaaaataaggcaccactttagtatagccttatgactaaattaaagtagtaccttaagtgtgaagttgatatcgaggacttaacaacctacactagaacgcaatcagcatatagagatgattttaatgttgtgacactatctatctacgagcgtctaattaagcaagcgtttaaaaaaattgatttctattacattgctttattttgatgcccaaacaatctcattataatttatattttcacgaacttgtgaagcgatatgtgcatccaatttattattttgtacaagtttatctaagaatgctctttgcatgtacaaaccttcaagtttatgcgcttctgtaatagaagcgggtgtttgattgtttttattttgattttttctaattctgtgtaatctattgtaatactggtttaaaacaatatttacttctaatacgttgtcacttgtttgttcagactttaagcgtaatgcaacgttgtgatttacaatacgcatgattttctttacttcttggaaattagatttaaattgttttatctgtgatgtgtctgcatgttttttagctctaattctcaaaatgagcatctgtaatactactttgaatttatgaagtgcagatgattccttgtattgtctagaagtttctaatgcagaacgataatttaaaatagtttgacggtctactttgttttgagaaactaagcgttccaacgtctcagattcttcttcattggcaatatcttcaagacgcttcatttctttagcattattatcttctggtgacatttgcagtaaaaagaataattcatcaaaatactctgatataacagtattatagtttatagactcatcttctttagatttaactttaaagtgtttaattacattttgaacaataaggactttggcagcaacataactcatagaagttgatgctttgcgttgttcagacggtgtaattaatgggagaacgatttgtgccatgactaaactaataattaccatcaaagaagcaataaatagtaagtcatttttataagtaaacgtttgttgctgtgctagtaaagtgggcaaggttagtgccatagatagcgaaatcgtaccgtgaataccacacattgtcatgataaatgcgtaatgcacccgttttggcggtgtttcttgattgtcatttaaataggattgaatgttattcggatagtaaaattgtttgaataagatgaacacccaaataaaacgaaatacataaatggctagagcgataagtaacgttgtggtaattaaaaatttaatattttctggttctttattaataatttcagaaacgacctttggcacgatgaaacctaacactacgaaaacaaagccattaagtacataacttaaggtactccaaatttgattgtagttcatttgtaactctgtttgagcacgtatcaaacgatctctttcaaatccatgaattaaaccagcgatgactactgcgataataccggacgcgtgtaacatttcagcgacaaaatagactgcaaagggagtcagtaattgaatgaaaatcattgtattaccatctttaagccctttattcattgataaataaatacgcaaacgtacaattaacatgccgataacaatccctattacaacccctaatattgtagaaataataaattgttcaattgcatcaaatgcagagaatgcgcctgttactaaagcagtcactgctattttgaacgaaataataccagcagcatcatttaacagagactcaccttcaagtatagatagtgccccttttggtaggattttacctttagtgattgcttgaactgcaacggcatccgttggacagaggattgcagcaattgcaaatgctgctggcataggaagttccggccaaatccaagcaataaagtagccgacgccaataacggtagtaaatacaagcgccatagccatcaaaatgataggtttacgatattctaacagcttagttcttgatacatgtgtgccttcaacaaatagtaatggtgcgatgacagccatcataaatacttctgaatcaaattcaaaatgcaaggggataggaaggacataaagacagacacctaacgcaatttgaacaaatgccattggcactttagggaatttattgtgaataattgaactgattatcacagcaataataaagattagaaaagcttctagtaatagcataaagactcctagttatttttttgattattatatcttatcattatataaaaatcatagatagtcatatatagaatgtcactaaatttaataagtatttcaaaggattgattaggcgcatcatttaatactatttaacggaatatgtcataatggtgatgttaagttaatagaggaatgtgataaatatgaacattggtgttatttcggatttacatattgataggcataaatctctaaagccaaaggattatgaatacgaactcatcaaggcaatacagcgtaatcaagtagaattattattaattgctggagatatttcgaataattacaagttaactcaagcttttattaaatcagtagaagtacaagctcaaataaaagttttatttattccgggcaatcatgatttctggtctgctgatacgaatgctacatcagctgaaatcttagaagagtatatggggatggaagcctgtttaatcggtaaaccataccatttaaatgacgcttgggcaatagtgggaaatacggggtggtatgattattcatatgcaagtcctgaattttcacttgaacgcattgcacgtagaaaatactatggtgcaacgtggcaagataaggtgaaaattgattggcccatggacgatagaaaattatcgagaattgcagcaaatcaagccattaaagatatagaaaaagtcaaagacaagcaaattattttaatgacccatattgtgacacatccgaagtttgcagtgccgatgccacatcgattatttgattatttcaatgcttttattggaacatctgattttgatgaaatttataaaaagtatccaatccgttatagtattatgggacatgtacattttagaaatcgttttgatgaacaaggtgtcacttatatttgtccgtgtcttggatatcaacgagagtggcgttcagatgatgtgactcgtgaaatagatcatgcgctaaatatcattcagatttaaaacatgcagaaactataaataggataatgagtttaatttcattgtcgtttagtaaaaaaaagagaactagcgcccgatcaaccataagtgattttatcattttatgtttgattgggcgctcgttttattagcagttttatgataaatgaaaactcatgcggccaggcgcatcataactttgctctaattttgattttttgattttcatcaattgatatttggttggtattatagctggtaagataaatgattttcctaagtgggaccacaagggatcaatataataatagtgttgagcatcataaccaacgagaacggtgacgtgaatattagctactaactttgttggttggttatctaatttataagtacgacggtaaggtcttttacccagtacggtatgataaataacaacgggttgtccttggtctataatgtgacataaatcagttaaggattgaccagtgctatcaacgacatgatttgaatagcgtctaagatgtgggacgagagcagttggaaaaatagtctgatgataacctagttttatccataaatgatgtcctacgtatcctttatatgggttatttctatgtctcggccagtgacgcataatttcagtggctggtatgttaaggtggttaaattgtaaaataattgctgcagaaacaccctcacaacccatgatcatcggaattggaaacaattggctgatgggttttactgataaaatatttgaatgcatgatgaaaatctcctagtaaattttactcaacaaaagtgtgaatgaagttaattgctattattatatatctattcataaagattgcctattaagatgcttgaatttcgaagtaatagtttgccatggatattctatatatgttttggttataatagcaaaaaagagggtggggaatgcgaatgaattatataattgaagagttgccaacgttatctgttattggtgagaaaaagatatatgccactggacaaaaagcacaagaaaatatttttatgttttggatggaatttgatgatagtggaaaaaaagatcaattattagagctaggaaataatcaattgccgggcttacttggtgtttgcaagccccataatagtggagagatacattatttgataggcgtaaccagtgaacataaagatgacaaatggcggaacatagaattggaaggtggcagatacttagtatttgatgctaaagggccagtaccagagtcaattaaaaaagcgatgcaacaaattaacaaagatattttacctaaattggattatgaaataagacatgcaccattttttgaattatacaaagaaggggccattagagaagatgactatgtcacagaaatatggttacctattgtttaataaaatagaaagtaatcacaagtgggacagaaatccaagtctctaatagcgttttcgtagtcctacctatgcaatcaatgcaaggatgacctggttaaaggtataactaagctaacgctcatgctcatgcataaatcttgctagcatttttatgtggcaatatatgcgtttgctgatgcatcagaatgactcgtttctataaaatgaaaaaatcttttctttaaataagtgagactttgcattttcaattcagtcatctattacctaatataaaaagaggctgcgacatctatgtttgatatgctcccttcaaagtagacatttaaaaaatgaaaactttgaagggagtttttctatgtctaaaaaaatcgttgatctagatttattagaattgatttttgctaaatatgaaaatggtatgagtttcgaaaatattgtagatgtagttgatattgatatctctccaggccatctccgatacatgtacaacaaatatttaaccaacggtatacaatcttttatacgcaattcacaaaataataagtatacacttcaatttaaaaagaatgtggttcaagagtatttgaatgatggcatatcttataaaaatttagccattaaatataatatttctgctcatgaaactgtacgtagatgggtaaatcgttatactggaagaaaagagaatatca

SEQ ID NO: 24 - DNA, 33619 bp, Staphylococcus saprophyticus
tatttggtgcgtctcaatcaagtccaaatactgagcgactgatgaaagttgcacaagaaatacccctatttctcatattaatttcaattgtaggaccaatacttgaagagtttgtttttagaaaagttatttttggtgaaatttacaatttaattaatgcaaataaaacgataaaatttttaattgctgccattgtaagttccatcatatttagtgcagcacacgcagatccatcattttttataatttattttggtatgggcttcatttttgctgcattatacgtatataccaaacgaatttgggttcctatcttagtgcacatgatgcaaaatggatttgttgtcatcatacaagtacttattggaccagaaaagataaaagagctacaagaatcaacatcattcatatttaatcttttattttttaataatgtaaatatataaagggaagtacgtatgattcatttagttcgtacttccctttttattgtttttattttaatttgtcattcttgcgtctaacaaagtagccaataaccacaccaacaaaaataataagcattgctgtgattaaagcaaataaagttctttcaaatttcatttgaatcgtatcactggcttctttatctttcgtatgtgtcatttcttcatcactacttgtatgatattcatatttacctgtagtatttttattctctggttttttcaaatctggcatagaaccaatatcaccagtaatcaaagccaatacttgtttatctaaatttttataataatctcttgatttcaatggattaaaatattggaatttaaaataatttgtatctttttgtaattcatttaaaaatgcattatccgcgaaattttgtttttttaaaactgcggaaatttcactatcagaaacttgttctttattactacctaattgtttaacttgatttaatacaaatggattgtatttaaaagaaccggttgtcatttgattaaatcgattcattaattggtgttcattcgattccctattttggttattttctgttgtttgattcatagacggctgatctatattattcgaattcgagctatttttcccattatttgattgactatttgaatcattttgcgtacttgagcgatgtgttctatttacactgtcacgattatttgtttctgtgctcgatgcgttgccagtctcattactagatttatttgaattacttggtgtataagcgttgccacctgaattattaggtttctctggcttttcagtagttccattgcccttgtttggctgttctggctttccatttccttcaccatgcttattgggtttttgtggttttcctgatccaccaccactgccatttggttgttgtggttcttcgctccctccaccatcttcatttgagttgtctggcttacctgatccgccaccactaccgcctgagtggttcggttcttcgcttcctccgccatcttcatttgagttgtctggcttacctgatccgccaccactaccgcctgagtggttcggttctttgctccctccaccatcttcatttgagttgtctggcttacctgatccgccaccactaccgcctgagtagttcggttctttgctccctccaccttggttattggaatcctctgaatctcctgattctccatcactgccatcttgattattttgcttatctggatcttctgttgattgtttatcttcttttccattttgtttatctggatcttcggctgactgtttatcttctttttcgttttgtttatttggatctccggttgatcgttcttcgtcattcacttcactcgtgttatctgtttgctcagttgctctagtttgactatcaaatactttttgattgctaggaagtgacacattattagaacggtctacatcactgctttgatcatttttatttgtatttttactatttttagttaatacatcattatcatccttaataactgatgaactattattttgcgcatttttatctaattcattttcttgctgttctattgcttgtgtcgggtgcgcaactatagacgtacttaaagcaatagcaaaacttgatatcacaaatttatgagtattataccgcttcacatcatcacctccattaaaaaacaaatatatttatgtacagtatatagaaaatactatactttttcattaaaagttggtttttgaaagaaaatattaatacttttgaaattttatgtaaaatctatttacaaatcaagatataataattatactaggtatataaaataaattgacttgaaggagatttttcacatgggattatttacaaaaaatgcttcaacattagaaacttttcaaaatgcaattgaaacaagacgttctatttacagtttagaaaaagaaatttctatatctgataaagaagttgaggatattattgaacatgccattaaacatgtaccatcttcatttaactcacaatctacacgtatcgttttattattaaatgataatcatgataaattttgggacattactaaaagagaacttaaaaatacaatgggtccagatcgtgaattccaagcaactgctgacaaaattgataacttcaaacattcgcacggtacaattctttattttgaagaccaagacgttgttgaaggattacaaaatcaaatgccaaactatgctgaaaactttgctgtttggtcaactcaaacaaatgcaatgcaccaatttgctgtttggacagcattaggaacaaaaggtatcggagcatctttacaacattataacccactggtagatgttgcagttacagaggctttcgatattcctaaaacttggaaacttgttgcacaaatgccatttggtaacattcgtgacgaagctggagaaaaagcattccaagatgttaaagatcgtttcttagttagaaaataataaattaacctgcgattcatcgttttctataaaattaacgaggttcggacatagatgatattgtccaacctcgttttttttattaaataaattattcaaacagtgcttattttgagttatcagaatttttttagtatattgggacaaacagcttttaaggggcgattaatatgaatatagaaatttttcaatttaaagtagaaccagcaaatacagaattaaatgaagaaacaattgctacttggttttctaactatgttacatcacaaacagatgtcgttgtattacctgaaatgtggaataacggatatgccctaccacaacttcaagcattatctgatagccgattgtctcgtagttacgagtttatttctaaacttgcaataaagtatcaggttgatgttattgctggatctgtttcaaatgcaaaaagtaatgaagtatataatactgcctttgccgtttcaaaatacggaaaacttttaaataactacgataaagtacacttagtacccatgttgaatgaacctagctttttaaatgcaggtaatgctgtgcctgagccatttaatttatcgaatggtgcgagagtcacacaaatcatttgctacgatttacgtttccccgaattattacgttatccagcacgtaaagatgcacaaattgctttttatgttgcacaatggccattagtcagattagatcattggattgcgctattaaaagcacgtgctattgaaaatgatatgtatgtcattggatgtaatggatgtggagatgatggtcaaacggaatacgcaggtaattctatcgtcattaatcctaatggcgaaatattgtcacaattaggttataaacctgaccacataacttgcgaaattgatttggaggaagttgacaagcaaagagacactattccagtgtttaaaaatttacgaccacatttatataaataataaaaaaccgtgagcttgggagggactcacggtttttgtaacttattattaagggaatgtttttacagttatttctctatctatttttggggatgttattaattatgaaaaaatttagtgaatttaccgatttaaaatgataaattgaatgatgtttacgatagcttacatgttaaaactttaattgtctctgttatagacaatgttaaaatgatatttgaattgagactgggaatgttctacaaattcaaattagggattgcttaatttgcttaagcgcgttgtgtacctgaaagtattattttacgaaatcactaattactgctgagaaatggtttgtcactacatcagcctcctcttgtttgtaatcaattaattgaaaaaacgagtactaattgtgtaactataataactatacgaagaaagtacagttacaaagattagtgtgttcattagacccctgctcaaaagtctaaccaacttcatcattcaaacaaaaatttcaaacaaaatttgattaaatgatttgtaaaatgtaatcacttctttgtgatacaagtacatttaaccatgatttttctacttagagttaaaaattccctaactcgacaaaattcgtgcctaaatgtttttaaaaatatgataaaattagtcagataagattttcaaacagttaggaattcaaaatatacagttaagcaataagacgcataaaacttaattacaattgtataatacgagtaaggagagaaaccaacatggtaaaatttatagatgctaaaatagacaattttgctaaacaactgcaacaacgaaataacttggaccgtattgaatatttaaagatgcgtttaggtatgcaagttgtcgtaaataatttctttaaaacaattgttatttatggtgtttcactcctttgccatatgtttttatacacactaactgttcatttaacatttttttttattagacactttgcgcatggcgcacacgctaagaattctttactttgttatatacaaagtgtaatttattttgttttactaccttggatagtcgggtatgtacaagtgtcatctctaattatgtatactttagcactagttggattaatcataattagtatatatgcaccttctgctactaaaaagcaacctatacctgaacgactaagaagaggcaaaaaaattaaagcaatatgtttaacattaatctttttattaatttcgctctttttaaatgagccctaccagcaattaatgttattaggtattgtgattatatctattttgcagttcccgatatttttccctaaggaggattattaataatgaatgttataaaatctatttcaaaatctatttcaaaatctatttcaaattatttcgctaaagtctttgcttctataggttcaatatctactatcaatccttgttttggttatactgatgaatctgaaattccaaaagaattaacagatctttacgaataatagttatgtagaaagtgtgtataatatggcagttttttattctttgtttttctcattattacaagcaattattatattttacaatatgaaacttattagcggcatccgctatactaaaagggattttatttcaattattggaataataatcccttcaaccattttgttttttattttttcttctgcatctgttatatttttattttttacaagtacaattcttatgtattataaaaacaaatttataggagttgttacttcattaatctgttttttcattttatacatggctaactttacaagtttatggttaagtagtgtgattgtaaatgcaattggtattgatagtgtttatatgctatttgtagctatttcattcactatattctccataatttacgcttatatagcaaaattctttattaaacaattatcagtttcagacttatcgttaaataaaatatatttaacattagttagcctatttttattaactatcttaggtctaatttacttttatttacctaatagagagatgtcttttggtgatgcaaaattcatttcgattatgtatgcagttgtcattatcaccactgctattcttatcattacaatttcttttagcattattcgccaaatacaatacaaacgtaatatgcaagaaattgagaattattataaatacacattacaaattgaaaaaattaaccatgagatgcgcaaattcagacatgactatgtcaacatcttatctactttatctgattttattagagaagaagatatggatggacttagaaagtattttcgatctgaaatacttccaatgcaagatagcatgcaaatgaatgcaattaaaatcaatggtcttgagaacttacatattcgagaaattaaaggactgctaacaacaaagatattacaagcacaagaaaaaagtatccgtatcagtatagaggtacctgacccaattgaaaaaattgaaatgccaacgattaatttaagtagaattattggtattatactggataatgcgatagaagcttcagaaaaaattgaagatgatccattgatacgtatcgcgtttattaaaaacgaagatgattctgttatgttcatcgttatgaataaatgcgaaccaaatatgccaaaagttcatacccttttccaagaaaacttttctacaaaaggaaagaatcgtggtctcggtttatctactctgaaggaattgacggattccacaacaaatgttttattagatacaaccattgataataactactttatccaaaaggtagaaattttaaattctgattcataaggatgtgtaactatgaaaatattcatttgtgaagatgatgaaagacaacgtgagcacatggtttctattattaataactacatcatgattgaagaaaagccaatggaaatcgaagttgctactgttgatccttatgacatcttagaacgctctaagaacctcaatgatattgggtgttattttttagatattcagcttgaagctgatattaatggtatcaaacttgctagtgagattcgtaaacatgatcctgtaggtaatatcatctttgttacaagtcacagtgagttaacttacctaacatttgtctataaggtagccgcgatggatttcatttttaaagatgatccagatgaattaaaatcaagaattattgactgtcttgaaacttcagaatcaagattgaagcttctttcaaaagaaagtagtgttgaaacaattgaattaaaacgtggaagtaattcgatttatgtccaatatgatgatgttatgttctttgaatcatctactaaatcgcatcgattgattgcacatcttgataatcgtcaaattgagttttatggcaatttaaaagaattagatcaacttgatgagcgatttttcagatgtcataatagctttgtcgtcaatagacacaatatagattctattgactctaagtcacgtgttgtctattttaaaaataatgaacattgctatgcatctgttagaaatgtcaaaaaaatataatatacataaaaaagccaaaccaatagtcattactgacaaatggtttggctttcttttttgattgcttcaacaattcctatttaatatttaatgcttctttcactttgtctagtgaagggatactttctattgcaccgtattgcgtcgtgacgatagcagcaacataattactaaattctaggatagcatgcccctcattcttcagtaactggattatatctcgctcattactatccaataatctactaatcaccgcaccaataaatgcatcaccagcacctgtcgtatcaatcgccttcactttatagccttgctcaacaattgttgttccatcctttaagtaaattgcagcaccttctgcacctttggtataaataaccgcttggacatgtccttgaaatagccattgaattgcttggctctcatcttcatatcctgtcacaaatgacagttcttcatcggaaattttgatgatatctgcaaaaggtacaaacgcttgaattgctgatttacaatccgcttcactatcccataacggtaaacgcacattaggatcaaatacaactgtcccattagcatgtctaactttttcaattagggctttatgggccattttcatcggactatctacgaggtctactgaacaaaagtgtagtatatcttgttccgttacttctatttgactcacttgttcttcattatatagcatatctgctgaaggcttacgataaaatgaaaaatccctttctccctctttagttaaacttacaaatgcgagcgcagtattcgcttcagatgaacgtttcaaatattgcgtaccgacacccaaatcttctaatgtttctacgataagatcaccgaaagcatcttctcctaattgggtaatcatttctgcctgaccacctaattttgtcgtagtacaagcaacattacaaggtgccccaccaacttgtctcgaaaatccttctacatctttgagtttagaatctgttgtattaggtataaaatcaattagtgcttcacctattgcgagtagacgtctcattgtgtatcacctttcaaatcatattttgtaaatcgtaagtatacttgtcctgattctgttgatgttttaatgccagttgcatcttctccagaaaatattctagaggacatcactcgttctccatcgttacagaaaatttcaatacttgaagtatctacatataactgtaactgcgataaaggtgtatctaaataagtactacgagacgtaccttctacaggattaggcaatggtccactttcacttctatcaaatgttaatttttgttctttagtattatacgtaattagcgacgtctccgttttactcgttctcacttcaaagtatacttctgttgcttcattttccaaaatatcaataattaattcaaactgtttaccttcatatggatgtaactgtttcgtaaatttattagcatatcccaaagcagtttcttcatttgaacgtaacttttctagtgctttaatcggacgttgttttaaattaccttcctctactgtaagtacacgtggaatagttaaacaatgtgcccatccgtcttcatcagttggataattaatttctggtaagcccatccaaccaatgagtatacgctgtccttgttcatctaaaaatgtttgtggcgcataaaaatcaaatccatgatctaactcatgaaaatcaccatgattcatagttaattgattcatatcatattgtcccatgatgtagcctgattgataaatatttctaaactgatccccttcagcgtcaataccttgtggacagaataataacatatcatatccatttaaattgaaataatctggacattcccacataaaaccaaaatcatctaaatttgtttgtatttcaccttggaattcccaattaacaatatctgaggatcgatattgtaaaatacgaccttgcttgtcaatattttgtgcagcaattacagcataatatgtaccatctttttcataaactttcgggtctctaaagtgttgcgtgtaaccaaaaggtggtgctgaaatgacaggctttggaaatttttttatttctccattctttgtcatttttgctatctgttgggtagaaattcgatgccaatcttcatcgcgatgattcgcagtatacatataatataaatgctggttatattcaaatgcactaccactatatacaccatgactatcgtcgtttgtatctggtttgagtgttggtcctactgcattaaaatgaataagatctttactcgtatatgtataccaatattttagtccatgcactggtcctaatgggaaccactgatgtgatatataataattaccattaaaatatatcaatccatttggatcattaagtaaacctgatttaggttgtatatgaaaagtttgtctgtatttagattgattaacacgttctgttaattcagctaaatattgttgatctgcgtcttcatatttttgataacgtgcttcctttgtccactctaccatttcgagcttcctcctagtttcaagtaattcattgtcatttttggtaccggttccatttattcatatttataatatcatgtttcgtttaatttttaaacgaatggtcaatttcaatagtgatttgtttttctacgtctttatgttgtattaattgatttaatttttccatagcaacttctcctgcataatcaaaagcatatctcaccgtatgtatagatggcgaaacaatttttgtaactggatctccaccaaaaccaacgatatatttagacatatgatgttccgaattatatttatgaacagctaaagctatcgaatcagtcgcccctacgatggcatcaaaatgtggatatttttgtaatacgctagctacgtctggtttggcttcttgatagttaaaagatgttatcgaaatactgggctcaataccatgaactttaagtccatcgataaatccttgctttctatagatacctacagccgtatctgtctccgtaacaccaaagaattgaatatccttatagccctgttttcccagtgtatctccaacaagataaccagcttgataatcatcgtgaacaatacaatgtaattgttcatgagtttgaccaacaatgatcacaggtacattgattttatgaatcacttctaaatgtttatctgtaatatctgtggccataaagataatcccgtccactttacttctgtaaaaagtctctagtgcatctagttctaaatctgaattcaaattggtgtaattaagcaatagcctataattttgtttatcgcatatcgttttaacacctttaatcgtttcatcaactgcaaacgaattcattcttggtatgatagcgcctatcatatttgtacgatgtgctcttaagctttgtgcgaattgattcggctgataatcatgttcttgtatgattttatctaatttttcttttgttttcatacttaccgagccatcatttaaatatctagaaactgtacttttagagacaccggctagttttgctatatcatcaatatttttcatagtttctcactctcattacttcactattatgaacaatatcaattctatcataatggaatcgctttaaatactatttaaattaaaaaccaatttgcttcaatcaaggtatactaccttagattaaacaaattggtttaatgtatatttaagctttttgaattgtaatcgtccatgaagcatcgtctaattgttcgtaattcgttacggggtaaccttgctctgctgcccagttaggtaatgcttctgttgcttgtgtacaatcgaagtcaatttttaattcttcaccattgtctaatgtattcattttcttttgtgcttctattaatggaaatggacaaaccattccaactgtacctaattcatgtaccatatcgtattacctccattttaattatgatgtttgcgtttgtgatgaaactttcgtgtttgaagtttggctttgtgcttttttcattggtctaataaatacaaaataactcattgtccatgcgcctaatatcattgaagcaagtgcaatccagcctttccatgacattgtcgctgtctcaactaaaccattccctatagagcaaccacctgctacagatgcaccaaatcccattaacacaccgcctataatactattgcgtattgtttttttatccggtaatctccatttaaactctttagcacctttagccgcaatataagagccaaagaatatacctagaaccaggaagacaccccagtccaataatttcaagtcacccgttacaaaaaattgtaccaagtttgcagaaggtgttgtaatacctaaaccatacattctaccagttgattcactcaccggccatgcgagcaatgcgataagtcctactgcgattgctgccacaaatgggtggtattttttctcaaataaataatgacgtatacctgtgaatttttgctttagtttaggtactgcaaattttggttttggtttacgtaatgtttttactacgaagaataaagtgattactatgagtacaattacgaaaaccccaggttggaatacctggttgtttgtgacatactcgtatttacattagtaggttatttaaaccgttcatttatggtagtaataaaccaaattttgttgcggcggaagtaaaagcataagcaattaacgccatccaactaccgattagtccttcaccagctctataccatgttcctgtagcacagccacctgccataataatacctaatccaaaaataaatgatccaatcactgtaccaatgataggatatgttgactctggtatttcaactaatcttgttgaagttaatagcaataagccaatactttgtacagaaatcgcaattaataaggcgtaaaacattttgttactcttttgaatatacatatccctgaatccaccagctagacaaaatcgtgttcgctgcataacaaaccccaatagagcgcctacgaccagtccactgataattaaccatgtcatatcataacctctttcccgataaaatcaataagattaataatattagatttcgtataaaatttcaaccttacagtttcacgaaaatttattttaaaaatcagctggcttttaaaataattaacaactcgaagacaaataaaaaactagcttttcataaatactttgtccacatggttatcacatgccgtatttatcaaaaactagttcattacattttatttatgactataattcttcataaagaataataaagattgcagttctatacccaaatcaatgtgatgtacttgtacatcggatggcgtttgtacacgactaggcgtaaagttcaatatacctttaacgcctgctttcactaatgtatcagcaaccttctgagccgcttcctcaggcgttgtcagaataacgacatctatctgttcatgcgatagtatgtctgtaattttttcaaatggactaactgtcactttccctatttgtgtaccaatgacctcttctcgaatatcaaatgcttctgttattgtcatttcatcatgtattgagaagttatatgttaataatgctttacctaagttccctacacctacaattgcaatcttaatttcatcgttttcgcttatttcgtttttaaaaaaatgtaataagctatctatattatagccgtagccctttttacctaattcaccaaaatatgaaaaatccctacgtatcgttgcagaatcaatgtttaagccttcactaattgcttttgaattaactctgtctataccttttgattttaatgtattgacgaatctataatataacggtaaacgtttcaatgtagcacgaggaatcttttcgctttgattagccaagatcatgtccccctatttcaatgtctaatactgtataatcttataatcactacaacattatacatgaatgcatcataaaaataaacaatgatagttttaaccacagcgtgaatactgtagaatgataattgaatagagaggtgcaaatcggatgatattattacaacttaatgatttaacaaagtcattcgacggtgaagatatttttaacaatgtggatttcgaagtcaaaacgggcgaacgtattggaattgtcggacgtaatggagctggaaaatcaacattaatgaaaataatcgctggcgtcgaagggtatgatagtggttatgtatctaaaagtaaaaatttaaaacttggttacttaacacaacaaatgaccttagacacaaatcaaactgtatttgaagaaatgtctaagccatttgaagcaatgaaaaaattagaactagaaatgaaaaaagaaacggattggcttgcacaacatgccaatgaatacgatacagaagcatataaaatacatattgatcgttatgagtcattatcaaacacatttgaaaaacaagatggctatcaatatgaaagtaaaattaaaacggtgctacatggcttaaacttcactgaatcagattttaatagacccattaatgattttagtggtggtcaaaagacccgactatctttagcacaaatgttactaagtgaaccagatttattattactcgatgagcctaccaaccatttagacatggaaacaactcaatggctagaaagttatttgaattattttaacggggccattgtaatcatcagtcacgatagatacttcttagataaaattgtcactcaaatatatgatgtagcactcggtgatgtacaacactatgtaggaaactatgcacaattcatagaacaacgagataagtattacgaaaagcgcatgcaagcctatgaaagtcaacaagctgaaatcaaacgcttagaaacattcgtagaaaaaaacattgcgcgtgcctctacgactgggatggcaaaaagtcgtcgcaaaaagttagataaaatcgatcgcattaataaacctatgattgatgctaaaagtacaaatattcaatttgatttcgaccgtaatacaggtaatgacgtattccatataaaaaatctagagattgggtacaatacacctattacaaaagggattaacatcgaagttacaaagggtgatcatatcgctattattggcccgaatggtataggtaaatcaactttaattaaaaccatcgctggtctacatgatcaattaggcggcgaagtcacaacgggtgccaatttaaaaataggttactatgatcaaaagcaagctgaatttaaatcaaataaaacgatcttagattatttatgggatcaataccctactatgaatgaaaaagatatcagagctgttttaggtcgtttcctattcgttcaagaagatgtaaaaaaaattattaatgatttatctggtggagaaaaagcacgactgcaactcgctttattaatgttagaacgtaataatgtactcatattagatgagcctaccaaccatctagatattgattctaaagagatgttagaacaagctttggataattttaagggcacaattctttttgtttcacatgaccgttatttcattaatcaactagctaataaagtatatgatttaaattatgacggtggcacgatgtatttaggtgattatcaatacttcattgaaaaagtagaagagcaagcagcaatacaagcgaaaaaagactcagagaatcctacttcacttgaaatagaagcatcaacaactaattcttatattgatcagaaagctcagaaacgtaaacaacgtcaaatcgaacgccaaattgaaacttgtgaagcggatattgagcaatttgaagcgcaaattaatgaaatcaatgagcagctcacattacctgatgtatattcaaaccctgaaaaagcgaatgatttagcaatatccaaacaacataccgaacaaaaattagaacaggttatgtctgaatgggcagaattacaagaaaagttaatttaaacgctcatcctattaaaaaatgaaagtagaattttctactttcatttttttatttcatgattcatcaccaaaactattcacacaaaaaaacttatgataaaagctatccacaaagttatcctagttatccacaagtaaaatgtaatgtttatttctatataaaattcagaattcaatccctatccacaccatttgcaccgacttatccacaagttgtgcactatttgttgataagtacgcacgttccctattgacatcattttcgtctcatgtagtcatagacaaatctagtttgtgaaacaaatgagacaatgtcataatgaacaagtacaaatttaagttattgaaaggaagttttgtaactatgcctgcaattttatggtttattattgcattgatattagcctccctattattaacgatcatcatgcctatcattgaaaataaaaaattaatgacaaagataaaaatgttatggtcagcacaacgaccattagaatcattcattagaccaaatcataattatagttatcaattcgatacatataagcataagcatgatagcgatgaactactcgatgataaaacctggtccgatttaaatttagatagtgtgttccaaaatatgaattttaattttacagcaattggtgaaatgagactttttgctacattaagacagatgtttgaagtaaataatcagtcactcatacatcactttaaatcggatagtcattttagaaatcaactgtcattgcacttagcacaaatcggaaaatctatttatccaatttttcctgatcaaattgcatttataaaacgaaatcacttctatatgatttgtacatatatccctattgtaggtttacttttatctttcatatcaccaagtgttggaatcccattaaccatcattgcttgtatttataatatgattttgagtggtttcttaaaacggacatttgagcaagatttaaattcaatgttctatacatctaatgttattaaaaaagcatatgcaatccagcaacttgaacaaacacctagtttagatgttaatttcaaacattttacgacagcacgtcgttttagtggattactcgggcgcgtgaatacgaatgatgaaacttcaattttctcaatgctttttaaattaatatttatgttggattaccatttgttccatttaattcaaaatagttttaaaacatacgaagatgaagtaatggcctgttatgattatgtagcaagtatcgataatcattatgccgttgctttatggcaagaaacattagatgactataccatacctgaaccatcacagaatgactcgattatatttgaaaatttaacccatccgctcatctctgatgcagtacctaattccttaacggtagatcaacatattttattaactggttctaatgcttcaggcaaatcaacatttatgaaagccgtcgctttgaatattgtgttatctcaaacaattcatactgcaacagcgcataaatttatttacaaaccagggcttgtttatacttcaatggttaatcaagatgatattttatctggagatagttacttcatgagtgaagttaaatcgattaaacgccttttcgatattcaatcacataaaaagatatatgtatttattgatgaaattttcaagggcaccaatacaacggaacggattgcagcatcagaatccgtattaacttatttaaatcatttacaatcttttagaatcattgcagctacacacgatattgagttatccactttattagaagatacttattcaaattatcattttaatgaatccatcacagataatgaaatctcttttgattttaaaactaaagcaggcaaagctgataccagaaatgcgattgaattattacgcataatggaatttccaaatcatgtttaccatcgtgctaaagctaaagcaaatcataataattaaaaataggagcatatcatgtaatcaaaaatcactttgattacatgatatgctccattacttaaaaaacacttattgaatattaagcgtattttataatttgatataagacatgcgccgcactcctggctaccttagtaaaacttatttctgcttattctgcattaatcatccatgtaataccgaatggatcgttgaacataccataaaattcagaccattccgtagcacctaatggcatcgtcacttcacaaccagcttcaacagctttatcaaaaaatgcttgagcagctgctttatccgcttcattactatggtcaaaagtaaatgtcacgatggcaccactattatcaatctttttatttttccacgtgtcactacaataaaatctttctccaagtatttcaaaagatgcattcatcgtaaaatctggaggtacttgaaattcttcaggcatatcattaaacatctcattgtctccgctaacacgttgaatatttgttgctcctaaatgtttttcataaaaatttaatgctgctaagctattttgaaaattgaaatattgtacagctttcattttatttctcctcctttaaaaatcttcatctcaaaaaattttatgttgttcaattaatctaaaatacctatacccttatttcatttgtttaaatttaacttactaacaaaaaaactgagatataaatatctcagttcttttattattttatgattcaattgaacattgttcaatatccatatgattataaccatttaatgccatatctgcagtcacaccagctttaaataaataataacctgcagcgcctatcattgctgcattatctgtacatagtttaggactaggtatggataaattgatgtcatttgactcacatgcggatgataaatgcgctcttaatcctttattacttgcaacgccaccagctactataagttgattcacgttataatttttacatgccgctattgttttaccaaccaatacttcaacgacactattttgaaaacttgtagctacgtttgcttcatttattgcttcacctttttggcgtaagttatgcaatttattaattactgcactttttaaaccactaaagctaaaatcataactgtttttatctaaccatactctagggaaatcgtaactatcctcaccatgagccgctaaattatctacttgaggtccccccggataacttaatccaatggttctcgctactttatcatacgcctcaccaacagcgtcatctcgcgtttcaccgatcacttcaaagctcaaatgatttttcatataaactaattcagtatgtccccctgaaacaatcagtgcgattaaagggaactgtaatggcttttctagatgattcgcataaacatgaccagcaatatgatgaactggaattaatggtttatcataagcaaatgcaagtgcttttgcagcattaatccctaccaataatgcacctatcaagccaggtccttgtgttacagccactgcatcaatatcattcattgtagtattggcactgtttaatgcctcatcaatggttgtcgtaatcccttcaacatgatgtctgcttgctacctcagggacaacaccgccaaatcgtttatgactctcaatttgacttaatacgatattactaagtatgttttttccattttcaataatgctaacacttgtttcatcacagcttgattctatcgctaatatcaatgttgtttcactcatttaaattcacccacatcactattgcatcctcaccttcaccataataatttttacgttttcctccatattgaaaacctaaattcgtatacacatgttgtgctacatcgttatcaactcgtacttctaaactcatcacgtcacattttgtctgcacgtaattcatagcatacttaagcaataactgtcctaacccgtatcctctatatgtttcatcaatggcaattgtggtaatttgtgcttgatctataactaaccaaattccgatataaccaataattttttcattaaattctataacaaaataatgagcaaattcattttgctctacttcgtgataaaatgcatcaattgaccaactactatcattaaaactatttctttcaatatcaaatacttgtggcacatcatttaaacccattaaacgaatatttaattcttgttctgttggtctaaccaatttctctctgcctctgatattttaatatagttgggtttgaattgatgaatttcagttggatgatcaatcagtgctttcatttcttttgcttttggcaaattaggtatgcagtcatggtttaataaatcagctaatttttctgtatctgcccctacaaatttaaaatgttcaccttgtttatatagcaattcctttaacattgtaatcgaaagatactgatcttcaatcaattgtactaaatgtccattttgatactgatatacacctgaataaactgcttctcgtcttgcgtcaaagacaggtacaattaaaatgttttcttcctttactgtagctgctaaggcttttaatgaggacacaccgtataacttcgtattaagtgcatatgccaatgtcttagctacagtcacacctattcttaagccagtataagatcctggaccttccgcaacaataattgcatcaagttcctttttatctaattgactttcttctaatatattagcaattgctggcatcaattgaacagaatggttctttttttcatttgtattaaattcacttagtactttatcatcttgcataatagcaacagataaaggctgattagatgtatcaatcagtagataattcacgcaaaatcgactccttaatatctatataatgctttccaatagcgttgaattctatggttctttctgtagggcttatagctttaatatctagtgttagtgacgtttcaggaaggtattctgaaataaattgactccactctattaatacaatcgcttgatcttcaaaatattcatcaaagcctaaatcttcttccgtattttctaatctatagcaatccatatggtgtaatttcagatgactaccttgataagattttatgatattaaaagtaggagaattaatatttctcttcacgcccaatgctttgcctataaactgacttaacgttgtcttacccgcacctaaatcaccatttaacaaaatcacatcaccagcggataaatattttgttaaaatgccagcaaatgtttccatatcttctaaatttttaatttttatcattggcctctcctttttaaagcaacttcacaatttattgtgaatagttgcttttatgcatgagcttcagctcaggtattccttcattaaatttattgtgcgtagctgattttcttatttaatatgagttagcttatgaatagccttgtcatttactaacggttatatatatatcttaaaattaactactctagtttaacaaatttttccatataatacttcaaagtgaaacaagttcctttaattttgaaatatttgaattgacagaaaaataaaaaaagttattgacacaacccatttgatatagtaaatttaatttatcaaatttttagacatttcaaacaaatcagaaaaaaataaaccattctatcgagaggagtataataaaatgaccaaacatacaacgcaagctcaaccaacaacttcaaatattttagtcattttattatgctcataggactggaactttagtaaagaaactactaaacgtttaagtccttattctagttgaatgggactttaaagtgtcccaataatttattgggacactttttttattttcaattttatgggggaattaaatatgagaagtgacatgatcaaaaaaggagatcaacaagcaccagcaagaagtcttttacatgcaacgggtgcattagaaaaaccaacagatatgaacaagccattcgtggcaatttgtaactcatatattgatattgtccctggacacgtacatcttagagaattagcagacatagcaaaagaagccattcgtgaagctggtgcgattccctttgaatttgacacaatcggtgtagatgacggtattgcaatgggccatattggaatgagatattccctaccatctagagaaatcatagctgatgcagctgaaacagttattaatgcacattggtttgatggtgtattctacatcccaaattgcgataaaattacaccaggcatgttattagcatctgttcgtaccaatgtaccagctatcttttgttcgggtggtccaatgaaagccggtttatcttcagaaggtaaagctttaacactttcttcaatgttcgaagcagttggtgcatttaaagatggatctatttcaaaagatgaatttttagatatggaacaaaatgcttgtccaacttgtggttcatgttctggtatgtttactgcgaattcaatgaactgtttaatggaagtgttagggttagcccttccatataatggtactgcacttgcagtaagtgaccaacgtagagaaatgattagagaagctgcattcaaactagtagataatattaaaaacgatcttaaaccaaaagatattgtaaccctagaagcaattgacgatgcttttgcattagacatggccatgggtggttcaaccaatactgtactgcatacacttgctatcgcaaatgaagcaggtattgattatgatttaacaagaattaatgaaattgctaagaaaacaccatatctttcaaaaatagcaccaagctcatcctattcaatgcatgatgtacatgaagctggtggtgttccagctatcataaacgaattatttaaaaaagaaggtacattgcatccagatagaattacagctacaggtaaaacattacgtgaaaacaatgaagataaagaaatcttaaatagtgatgttataagacatttagataatccatatgataaacaaggtggactttccatcctttatggaaatatcgctcccaaaggtgctgttataaaagttggtggtgtagacccttccattaaagtctttaaaggtaaagcaatttgttttgactcacatgacgaagctgtcgaagcgattgataaccatgatgttcgtgaaggtcacgtagttgttatccgatatgaaggccctaaaggtggtccagggatgccagaaatgttagcccctacttcatccattgtaggacgaggcttaggaaaagatgtagcgcttatcacagatggaagattttcaggtgctacacgtggtattgctgttggtcatatatcaccagaagctgcagcaggtggtccaattgggttaataaatgacggagatgaaataacgattgatttaacgaaccgtacattagatgtcaatgtttcaactgaagaattagacgctagaaagcaaaacgtaaaaccatttaaagcaaaagtaaaaacaggttatcttgcgcgttacactgcattagtaacaagtgctaatacaggtggtatcatgcaagtaccagaaaatctcatttaaggagtgagcattatgtctaaacaaacggaaacacttgaaaacgaattgtcagaaaattttgattctttagaagcagctgaagccgttgaacctgaggtagagttagaacaacaaacaatagatgagatgaaatccgggtcagaattgttagtagaatcacttgcaaatgagaacgtagactttatctttgggtatccgggtggtgcagtactccccctttacgacacattttatgatggaaaaattgaacatatcttagcaagacatgaacaaggtgctacacacgcagctgaaggatatgcaagagtatccggtaatacaggcgttgttgtcgtaacaagcgggccaggagcaaccaatgcaattacaggtattgctgatgcttatagtgactcattgccacttgttgtcatcactggtcaagtcgctacacctggtattggtaaagatgctttccaagaagctgatttactttcaatgacaacaccaataacaaaacacaattatcaagtaaaaaatgtaaacgacatccctactatcattcatgaagcgtttcatatcgccaatactggtagaaaaggtccagttgtaattgattttccaaaagatatggggatcttatcaacaaacgcacaagtaacagaagaattagaattaccaggttattccgtaccaaatcaacctaaaaaagaagaaattcaaaaactacgtgattatttaaaaagtgctaaaaagcctgttgtactttcaggtgcaggtattaatcatgccaaagccaataaagtatttactgaatttgtaaatagacatcaattacctgtcgttagtacgctattaggtctcggtgctataccatatgaacatcccctatttttaggtatgggtggtatgcacggctcatatgctagcaatatggcattaacggattgcgatttactcattaactttggtagtcggtttgacgatagattagcaagtgatccagaatcatttgcaccaaatgccaaaatagtacatgtggacatcgacgcatctgaaataaataaaatcatcaaagtagatttaggtatcgttgctgactgtaaagcaactttagaagcattattagatttcgatagttattcaattagacatgatgactggttagaaacttgtaatgaaaataaagctaaacaaccttttgcatataaagaagatgaggacggcgtattttctaaacctcaaagaacgattgaatatattggtgaaatcacacaaggtgacgccgtagtaactaccgatgtcggacaacatcaaatgtgggttgcccaattctatccatttaaaaatcatggtcaattagtaacaagtggtggtctcggcacaatgggatttggtatccctgctgctattggagcaaaacttgcagcacctgataaaacagtcgttgcctttgttggtgatggtggattccaaatgacaaaccaagaaatggccattttagaagaatacaaccttgatatcaagattgtcattattaacaacggtacactcggcatggttaagcaatggcaggataaattctttaataaacgtttctctcactcagtatttaatggccaaccagactttttgaaattagctgaagcttacaatgtgaaaggttacttagttgaaaatccaagccaattagaacaacagttagatgcagcttttcaacatgaaggacctgcactcattgatgtacgtatttcacctattgaacctgtatcaccaatggtaccaagcggcaaagctaatcatgaaatggagggtctattatgagaaggtcttttagaacaaaagtaagagataaagctgggacgttaaatcgcttaacaagtatcttcgtccgtagacagtttaacatcgtgacattgtcagcgactccaactttagaagaaggtatttcggacattacttttgtagcagaagtacctgatagagatgtgttacgtaatctacttcaacaactagaaaaacaaataaacattattgatgttgaagacattactgaaagtaacacttacaacagagagttggtgctagtgaaattaaaaacaccgacgaatcagcaagatttacaaaatgtaatcaaaccatatgatgcgctagtctctatattaaaacatgaagcaccttttacgtatcttcaagcttcaggcccacaatatacaatggacaacttattagatgatctatcatcatatgaaattgaacaagtttctagaactggttcagcagcattagtttaacaaagcttcaactatacttaattacaaaaatggaggattttattatgacaacagtttattatgaccaatcagttacgaaagacgctttacaaggtaaaaaagtagcaatcataggctatggttctcaaggacacgcacatgctcaaaatttaaaagacaacggttatgatgtcattatcggaatcagacctggacgttcttttgacaaagctaaagatgatggcttcgaagtatatcctgtagatgaagcagcaaaacaagctgatgtcatcatggtgttattaccagatgaaattcaaggccaagtatataaagaagaaattgaaccaaacttagaagcaaacaatgcattagtattcgcgcatggttttaatattcatttcggtgttattcaaccaccagaaaacgtagatgtattcttagtagcgcctaaaggacctggacatttagtacgtcgtacatttgctgaaggaagcgcagtccctgccctattcgcagttgaacaagatccgagtggtgaagctagagatttagcattaagctatgctaaaggtatcggtgcaacacgtgcaggtgtattagaaacatcatttaaagaagaaacagaaacagatttattcggtgaacaagcagtgctttgtggtggtacgactaaattagtacaatctggtttcgaaacgttagtagaagcaggttaccaaccagaaattgcatactttgaagtattgcatgaaatgaaattgattgttgatttaatgtatgaaggcggtatggaaaatatgcgctattcaatttcaaatacagctgaatttggtgactatgtttctggaccacgtattatcacaccggatgttaaagataatatgaaagctgtattagatgatattcaaaaaggaaacttcagtgatcgattcattaaagataatcaaaataattttgaagaattccataaattaagagaagaacaacatggtcatcaaatcgaagcggttggtagagaactccgtgatatgatgccattcatcaaatctaagagcattgaaaaataattaggcaaactaccatatctatcgataaaaatgacatcaagctaagttctaatgcaaatcgtaatattttgcattagctaacttggtaagatgtttcaaatttctcgataaatatgattgtctaaaattcatttataggagatgttgaaaatgagtagccatattcaaatttttgatacaacactaagagacggcgaacaaacacctggcgtaaatttttcattcgatgaaagattaaagattgctaaacaacttgaaaaatggggcgtagacattattgaagcaggtttccccgcttctagttctggtagtttcaaatcagttgaagctattgctaaaacattaactactaccgctgtctgtggcttagcacgttgtgtaaaaaaagacatagatgcagtatacgaatcaactaaagcagcagctaaacctaggattcatgtatttattgcaacaagccctatccatcgtgattcaaaactaatgatgtcaaaagaagaagtattagcatctattaaggagcatgtttcttatgctaaacaatattttgatgttgttcagttttcaccagaagatgcaacaagaacggaattaccatttttaattgaatgtgttcaaacagctgttgatgcaggcgctagtgtaattaacatccctgatactgtaggttttagctatcctaaagaatatggtgaaattttcaaaacgttacaagaatctgttcatgctgatcatgatgtgatttatagcgcacattgtcacgatgatttaggcctagcagtagcaaatagtatggcagcaatagagaatggcgcaaaacgtattgaaggcacgcttaatggtattggcgaacgtgctggtaatacagctttagaagaagttgcactgggcctttatgttagacaagatcattatgataatcaaactcaaattaatttagaagaaacaaaacaaacatctgatttaattgctcgattcgcaggtattcgagtcccaagaaacaaagccattgttggacaaaacgcatttagtcatgaatcaggtatacaccaagatggcgttcttaaaaatccagaaacttatgaaattatgacacctcaacttgtcggagttaaaacaacagaattaccacttggtaaactttctggtaagcacgcttttgcagaaaaactaactgccctaggttacgatgttgatcctgaagaacaaaaaactttattcaaacaatttaaaacggtcgctgataagaaaaaagcagtaactgatcgtgacatccatgctttaattcaaggtacggaacatgaacaaaatgcaatttataaagtagagacacttcaattacaatttgtttctaatggtttacaaagtgctgtcgttgtaattaaagatatagacggtaatacgtaccaagattcaagtattggaacaggctccattgtttctgtatacaacgctgttgatcgtatctttgatcgtaaaacagaacttattgaatatcgcatagactctgttactgaaggcacagatgctcaagctgaagtacatgttcagattaagatagatgaccaaattgttactggtgtaggtattgaccacgatatcttactcgcttcttgtaaatcatatgttgaagcgcatgcgaaatatgtagctaatacaaaagtggaagaaggtattcattcatgagttataagattgtagcccttcctggagacggaattggaccagaaatattaaatggttcattagaaatattacaacagctaagtaaagaatttcattttgaatatgaattagaatcacatgactttggcggtattgctatagataatcatggcaaaccacttccagattccacattaaatgcttgtaaaaatgcagacgcaattctattaggtgctgtggggggacccaagtggacagatccaaataatagaccagaacaaggtttacttggcattcgtaaagctttgggtctgtttgcaaatatacgccccactacagttacaaatggcacaagccatttatcccctattaaagaagaacgtgtcgcaaatacagattttattttagtaagagaattaaccggtggcatctattttggtgaaccaaaacaattaagtgaaaacgacgcactggattccttgacttatactagagatgaaatcgaaagaattgctagagttggttttggattagctcaaaagcgtcataaaaagttaacttcagttgataaagaaaatgtactttcatctagtaaattatggcgaaatgtaataaatgaagtatctcaatcatatcctgatgttgaggtaaaccatttactcgtcgatgcttgtgccatgcacttaataacaaatccatcacaatttgatgtcattgtgacagaaaatttatttggcgatattttaagtgacgaagcttcagtcattcctggttctttgggattatcaccttcggcaagctttagcgaacaaggtccaagactatatgaacctattcatggttcagctccagatattgcaaatcaagatattgccaatccttttggcatgttactatccgtggcaatgtgtcttagagaaagtctaaatgaagacaaagcagcagataaattagaaaatgttatatatcaattaataaaagaaggaaaaacaacccgtgatctcaatggtaattatcttacatcagaaatttttaattacgtcaaagaaaatctttaaaaaggaggagatgtcatatgggtaaaacactatttgataaagtttggaacaagcatgtcttaactggtaaagaaggtgacccacaattattatatattgacctacatctaatacatgaagtcacatctcctcaagcttttgaaggattaagactacaaaatagacaattgcgtagacctgatttaacctatgcaacacttgatcataacgtgccaacggtcgatattttcaatattaaagatgaaattgcaaacaaacaaatcacaactttacaaaaaaatgcaaaggcctttggtgttcatatttttgatatgggatccgatgaacaaggtatcgttcatatggttggcccagaaacaggattgactcaaccaggaaaaaccatcgtctgcggtgactcacatactgcgactcatggtgcttttggtgcaatcgcttttggtattggtacaagtgaagttgaacacgtttttgcaacacaatcactttggcaaactaaacctaaaaatttaaaaattgaagtaaatggtaaattacctacaggtgtttacgcaaaagatattattttgcatcttatcaatcaacatggtgttgatttcggtactggttatgctctagaattttctggtgaaacaattcgcagtttatccatggaagcgagaatgacaatttgcaatatggctatagaagctggtgcaaaatacggtatgatggctccagatgaaacaacttttgagtatgttaaaggacgtccttatgctacaaattataaatatgatattgatgcatggcgcgaactatatactgatgaagatgcagaatttgatagagtgatcacattagatgtaactgatctagaacctcaagtaacttggggtacaaatcctgaaatgggtgtaagttttaatacgcccttccctgaaatacaaaatgtaaatgatgaacgtgcttataattacatgggccttcaacctggtcaaaaagctgaggacatagacttaggttatgtattcttaggttcttgtactaatgctcgcctttctgacttggttgaagcaagtcacgtcgttaaagggaataaagtacacccaaacattactgcaattgttgtaccaggttcacgtacagttaagatagaagctgaaaaattaggtcttgataaaatatttaaagacgctggttttgattggagagagcctggatgctccatgtgcctaggaatgaatccagaccaagtgcctaatggtgtacattgtgcttctacgagtaaccgtaactttgaaggacgacaaggtaaaggcgctcgtactcatttagtatcacctgcaatggcagcagctgctgctattaatggaaaatttgtagatgttagaaaggtggttgtataaaatggaaatcaaaccaatcacaacatacactggtaaagtcgtaccactttttaatgacaatattgataccgatcaaattattccaaaagtacatttaaaacgtatttctaagtcaggttttggaccttttgcatttgatgaatggcgctatttagatgatggttctgataacccggattttaatcctaataaaccagaatataaagatgcttcaattttaattactggtgaaaattttggatgtggatccagtcgtgaacatgcggcatgggctattaaagactatggttttgacattattatcgccggtagctatagtgatattttttatatgaattgtactaaaaatgcaatgttgcctattgtattagacaaagaagcaagagagtatctagcagatgctggagagattacaatagatttaccaaatcaaactgtttcgacaaaagataaatcatttgattttcaaattgatgaaacatggaagaaaaaactcgtcaatggacttgatgatattgatatcactttacagtttgaagatgcaatcaaaaattacgaagcagcaaaaacatactaattaatacaaaaagggtgaaactaatgactgtaaaaacaacagtttcttcaaaggatatagatgaagcttatttacaattaaaagatatagttaaagagacaccattacaaaaagatcactatttatcacaaaaatatgattgtaaggtttatttaaaacgtgaagatttgcaatgggttaggtcatttaaactcagaggtgcatataacgcgattattgctttagatgaagctgatcgtcaaaacggtatcacgtgtgcaagtgcgggtaatcatgcacaaggcgtagcttatacagctagtaaattaaacttgaatgctgtcatatttatgccagtaactaccccacttcaaaaaattaaccaagtgaaattctttggtggcgacaatactgaagtcgtattaactggtgatacttttgacgactgccttaaagaagcccttgtgtatactgaagaaaataaaatgaactttattgacccttttaataatatttatactattgctggtcaaggcacattagctaaagaaatacttgaacaatctaaagataacgacattcaattcgattatttatttgctgcaatcggtggtggcggtttaatttctggagttggtacttatttcaaaacgcattctccagaaacttcaattataggtgttgagcctgcgggtgcagcaagtatgtatacttcagtagtattggaaaatcaactagttactttaccagatattgataaatttgtagatggcgcatctgtagcgcgtgttggacaaattacttttgatatttctaaagatatcgttgatgattatatccaagtacatgagggtgctgtttgttcaactattttagatatgtactctaaacaagctattattgctgaacctgcgggtgcattaagtatagctgcacttgatcaatatcaagcagaaatcaaaggaaaaactgttgtctgtgtcgttagtggtggcaataatgatattaatcgtatgaaggaaattgaagaacgttcattattatttgaagagatgaagcattacttcatcctaaatttcccgcaacgtccaggcgcattaagagaatttgttaacgaagtacttggtcctaaagatgatattacgaaatttgaatatctcaaaaaatcttcccaaaatactggaactgtaattataggtattcagttgaataatcataaagatttgggacatttaaaagcaaatgtcgatgaatttgataaatcaaatatttatattaacgaaaataaaatgttatattcattgctgatttaagcattataagaggcctaatccttactatatagggttaggcctctttatatttaaaattattttgcaattttgatcgtacattacttgttaggtgtatgtttgctcctgtagtcgcactcattctatttactgcagtaagtacgttcatatatagagtgtctttccaatttattggatttagttattcttacatacgagttttgactcgtatgttcatttaatcaataccgcttgtaagctcgcttcgtcttttgctcagttcgtcagtttcaaacgctttctcataatagcttgttttaggcttttcagttcttcgaactggagaagttaagccttttttgacataaaaaaagagacctctcggtctcggctcatcgcatcctattaatgctgcctggcaacgtcctactcttgcggaacgtaagtaggctaccatcagcgctaaggagcttttcctatcatgaggcaagcgctcgcatcttttctcactttcacgctttcctataaagaataactttccaatttattggatttagttattcttacatacgagttttgactcgtatgttcatttaatcaacactgcttgtaagctcgcttcgtcttttgctcagttcgtcagcttcaaacgctttctcataatagcttattttaggcttttcagttcttcgaactggagaagttaagccttttttgacataaaaaaagagacctctcggtctcggctcatcgcatcctattaatgctgcctggcaacgtcctactcttgcggaacgtaagtccgactaccatcggcgctaaggagcttaacttctgtgttcggcatgggaacaggtgtgacctccttgccattgtcaccagacaatgaaatgtataaaattatacattcaaaactagatagtaagtaaaatatgattcaaccaaacaaaacatttaaaatttgattaagtcttcgatcgattagtattcgtcagctgcacatatcgctatgcttccacctcgaacctattaacctcatcatctttgagggatcttataaccgaagttgggaaatctcatcttgaggggggcttcatgcttagatgctttcagcacttatcccgtccatacatagctacccagcgatgccgttggcacgacaactggtacaccagaggtatgtccatcccggtcctctcgtactaaggacagctcctctcaaatttcctacgcccacgacggatagggaccgaactgtctcacgacgttctgaacccagctcgcgtaccgctttaatgggcgaacagcccaacccttgggaccgactacagccccaggatgcgatgagccgacatcgaggtgccaaacctccccgtcgatgtgaactct

SEQ ID NO: 25 - DNA, 33352 bp, Staphylococcus saprophyticus
atccatgatggtaaagctacccaatcattattaagttcagtagcaaaaaacagacttgataatactttataaacacgcaatcatattccctggaaaaaatactacaatcgcttgtttaaaagtctctttaccatgaaatgctacatacttttgattattcccctcatacaaatgcatctgtaaaacaatcaataatccctgttggtgtttctccatctggtatacctaccgccatattaattaaaggtaacggcccatgttcaacaggctgccccatcgtttttgcaaaataactatctggtacttgtgctaatctatccgaaatcaccatcaaagtcctcctaataaaaaaactatatacctacgaaagtggcatatagtttacatgtcacctatctttcaagtagtgttacttgttggacgaagcacagtacttctttacaaagtctgttgctgaagcttcacagggccaattccctcaacttctctggataagttttgcttttaaattactattaattttatcagaatattcaaacatgtcaatgcaaaaaaagggagtaggacagaaatcaaattttctaatagagatttcgtagtcctacctcggcaaggatgactaggattgaaaaaagcttgatataagtgtattttcaatccagtcatctactgcctaattgaaaaagaacctaagacattaatttatgtctcaggctcttatatttataccaccaaaccgcgtgttcagtgctataaatcctaccaccaaccgtgtgaatcacggtaagatatcgctgcgtctactgaaccataacgttgttcagcgtagtttaacatacctttagtttgatcagctactgaaccagtaccccatgattctttagtttgacctaaacctctgtatccagctgggttaacagcgtttggattaccacttgattcaggtaaaacgattgaattccacatagcttctgaaccaccagcagctaagaattgagctttaactgatccaccagttgaagcagctgaagtttgagcagctttataagtttttactgcagcacttgtttgtgcagtttgaacgtttgtgttagatgaagctttaggcgcttcaacagctgctacttcagtgttacttgattgttgttgtgtacgaacttcgttagctgaagtttcgttagtgtgtgtagttgcttgagcagttacatcttggatagtgttagaagatgcactttgagcacctgcagttgtataattccatgaccaagtttggccatcagaagtgaaagtatattcgtttccacctaatacgaaatcatagttatacgcaccagcgtgtaatggtttttcatttaattgctctgggttgttttgagctaagtcagctaaatgcgcttggtcgatattttcttctgatgcatgcgcttgattgtgatcagctgttgctgcatatcctgttacacctaatgctactgctaatgatgatgctaaaattgttttcttcataataaaaaaatcctccaattaatttctttttaagttaaattatattttcgttaaattatttatcgtatgtgctgaaatcttttaaatttaatgtcttatcttttcgccacaaataatataccataaatttcgttcagttatattacacttccttaacaaaacgttacaaatcaaattccactttgtaacattacgacatatttgttttattttgtaatgctaaataactattgatagataaaaggatattatatgagtatatgatataaagcgattaaataaatttacatttaagaaaatcatatattctgaaatattacaaatcacacttttgttacataactgtaaaataacaaaaagacaaaaaaattatattttggagtaaaacttgcaaatttttttgtttaaattaaaaaaagaccactgatgggtggccttttttaatcattttatatttttttatgtaacgacaaccttatgctttattacaaaatatgacacacattttaagcaaattgtgtaaccttacgctaagaacttgaagatttctctatcatatattttcaatatcttcatatataaggtattaattaaataccccataacaaatggtatgacaaaaaatgcaataaacacaaaaactaaattcaatattattgaatgttccataaatctaaaagcactgatcggtccaactagtccgataataccaaaaccagctgattcctttgtacctccaataccaattaacccaccaactaaacctgtaataagcgcattggtaaaaataggtaacaatataataggatgtctgaccatattcggaatcatcattttgacgccacctaagaatatcgtaagtggtacacccgctctatttattttaagtgagcctgctactaatgcaccttcacacgcaacaatacctagtgaagctgaacctgcagctaagccattgataccaatagctaaagcagtcgcaactgtggaaattggtgaaataataataaagctaaacactaatgcaatgagcattgacataaggactggctgcaactcagtaaaagaatttactaagttcccaatacctgttgtaatcatttggatatatggtaaggtaaatacaccaattacacttgcgatgacccccacaatggtaggtaaaataattaatgtcagactgccaaatttttctcctactaataatattaaaaatactgcaatcgctgcagtaaacattgtattaattaaatctccaactccaactaataaccacacgccatctttgaattgtgctgcgccgcttcctacaaatgcagagctagctacgactgcagttgctaatgggcttagtttgaaacgcatggcaattaaagcacctactaataaaggaactgtaaattgaatactttccacaacttgcaataaagttgtaaatactgaagattttggtgcaaaaagtttaaataattctcccaagatcgcattaggaattaaacctgcaacaatagcaattgctacacctgacagaacattatatagaaattgttttggacttactttaatcatagaagttcccccctaagttgaaatagaatactaccatatcatattttcttaattttcagaatatttattttgtattatttttcacttttactaaattcatcacaggggtgatttcatttagtagcaaacacaaaacattggaggaactcgactttctaaaaatcgcatcttatatcaagctaattttaagtgttttctaaaacgatatatatcaaactagcgagtctaggacataaatagtggtcctaaactcgcttacatttagcattagcagatagttgaattgaaaatgtaaatcctctcgtatttaaagaaactaattttttcatttttatggaaacgtgtcgtactgatacataagccaaaacttagatatgccacataaaaatgctagtaagacttatccatgagctttaacttaatcatccttgccttaattgcataggtagaactaagaaatctctattagaaattttgatttctgttctactcacactttttatatcgtcatttttatttatccattaattctgttgttaacactaccccctgtgtatccgtttcaaaaaattctagcttttgtaatgaattattttcaggtaagtgtttattaaattgatgccaaatccaaatcgcaatattttctgctgttgtattcatctctggcaatgtttcattcacaagttgaccatcaatataaggcgctatttctctttcatacagtttatctacttcattaaaatccatagctagaccatatgcatcaatgctagataatatttctatattgaacttatatgtttggttttctaaatctttatgcacagtttgagtaaaataaattctattatcacatgtaaattcataataattttttattaacacttcaccctctttatatcgaaaatggtcaggtggttgaatatgatcaaatttagacattaacatcactcctatttcccttttatttatatacccattcctgttccttctataatataactatgttttcaaatttcatttaacggtaataatatgattgatactaaatgattttcagggaggcagtagcatgacaattgaaatacaacgcatttatgaaaataatcagagcgaaggtacgcgtatacttgtagatcgtgtttggcctagaggcatatcaaaagaagacgcaaatttagatttttggttaaaagagctagcgccaactaccgaattaagaaaatggttcaatcacgatcccaaattatatgctgcttttaaagaaaaatatgccaaagaattacgtgacaatgaatcacaaaaagaagcctttgaaaaattaaaatctatcatttctaatactgagaatgacgtcatcttattatttgcagcaaaagatgaacagcacaatcaagcagttgtgcttcaagacttattaaattaagaggtaatttatgaatacatggcaaatttccgttcaagatgcatgcgtacaaacgctaattaaacaagatgccacacttgcgcagttaattaaccagataggagatttacagattcagacgcgcgcagacccgttaaaatcccttatccggtctatcatcggacagcaaattacagtagctgtagcgcaatctattttccaaaaattatccatcgccattgacgatcactggacggtaaatcaattatcacaactaagagaatccgaaatgaaagcgttaggtttatctcaatcaaaaataaactatatccaaaatgtactatttgcagtgcgcaatggacaattgaattttgaacaactctacaaaatggacgataatagcgttattaacgcactgactcaaattaaagggattggtagatggactgccgaagtttttcttctatttacattacagcgcaaaaatatattacctatatacgatgttggattgcaacgtgctgctcaatggttatatcaaacaaccaaagccgaaagaaagaaacaactcactatctgtaaggaacaatggcagggttgtgcttcaattggtgcattctatttatgggaagcaattcatcaagatttattacaatacgattctatctatgatataccaaaagaccataaaaattagggcgaggcaatgaaatcaaacattatcatttgaattcatcgtctcgccctattcacgttatctcaaaagctattattttttcataaaccccatttttcattacttcttgtgttgtttggtattaatagtatgaaaaactctaacttctagaatctcttttatttaatatagcgatttactctacttcaaataaactttcttctccattcggcaaatctttcacataatctttagggtccatcgcataatcgttaccaacgccaccttccatacgttgaaaatgcaagtgtgcgccagtcgtttgttcaccggtattacctgacagtgcaatcgtatcacctgctttaacgtcatctcctacttccactttaaattcattaagatgcatataccactgatgatattcaccatttgactctgctatctgaattactttaccacctaaatcatcatcgaatgttcgcgtcactttgccatcagcagccgctttgattggcgtatcttcaggcaaatgataatcgatgccgtagtgtttaccatcaaattcactaaattcatattccccaaaattttctgtttccctactgccatcgaaaaatttactaaaagaatcttcactttcaccttggtctgcgtcctgattttgtgtagtaaatgtttcattcatattttcttttatatcatttatattcagtattaaccacgttagtggaacaataataattattagtaagacaatccatttcattacatttttcactatttgattcaccttttaatcattttaagtattggctttttagtatactttttatagtgataaatctctaataattcgcttgaattagcgctcatactttagttgtagcaaaaaggagcagcactatgaaatctttatagtaaaatcagatttctgtaccactcccgcttataaatgcctgcttgttaatgtgtatgcttctcataacttgctaacatattttccattaatgtccatacactcgctacatcgaccgctgtagcaaaataggcatttttctctttattcataatattatttaaatctactgacatcgtgccatatgtcaatggactctggtgctctatatcgatatgtgtatgttgcattgtaaataaatcaggttgcatcaaataaagtatcgtacaagcatcatgtattggaccaccatccatgtcaaagtgcgttttatacgtagatttgaaaaattctagaagttctacaacaaagtttgcaattggattcttaatctgtttaaatctatcgataacatgatctgtggctaatacttgatgcgtcacatctaaaccaaacacattgatacacacaccacattcaaagacgcgcttagccgcttctgcatcaacccaaatattaaattctgcagtaggagtccagttcccgaaggtgccaccgcccataattgtaatagattcaatatgttgtgtgatatttggttccttaatcagcgccgtagcaatgttggttaatggacccgttgcaacaagcgtgactggttccttgctttgcttcaatgtttcgataataacatcgactgcttgtttttgcgttggttttagtgctgggacttcaggcagtttcggaccatctaaccccctattgccgtgtatttgtgaagcaaaggatgctggcttaataagtggacgcgtagcaccaacagagacactaatatcatctcttcccatcacttctaatacatttaaagcatttttggtatttttttctaccgattgattccctgctaccgttgtcacagctaatatatctaatggactgttttgtgctcctgctaaaattaatgcgattgcatcatcatgacccgggtcacaatccataattatttttttactcattttaatcactccaatataaaaattcacaacctatgcgtattcatgttaaaagcacgcattactcagctgtatgctttttgtattgtctatacattaaagcaagtacaatcaaccataaaggtgctaaaataaccccaatacgtgtttctgggttaacaaataataccccgaaaataaatacgaaaaatgcaataatacaaatcgacataatttttccacctggcattttatatctactttgtttatgtaagtccggacgtgctttggtataccttacataggcaatcataataattgtccaaataaagatatttaatactgtagaaactgtactgatatacacaaacacagtcgtcgcatttggaataaaataattcaataatactgcaaataacaataatgcacacgttacaagaattgcgacaacaggtacgcctttacggtttgtcgcttgaaacttcggtggcgcttgttttctatctgataatccgaatagtgttctactattagcaaatatcccactattacacgctgacgctgcagctgttaacacaacaaaattaatcatgcctgcagcaaatggtatccccactaatgcaaatactttcacaaaaggactgccttctggatctagttcattccaaggtataatagaaatgatgactgctaacgcaccaatgtaaaacaataaaatcctaagcggcacattattaatcgcctgaggaattgtcttatgaggattttttgtttctccggctgtgataccaatcatctcaatgccgacaaatgaaaagattgccatttgaaacgacattaagaaaccagacataccattagggaacaccccaccatgacgatagatatttgatacgctagcatgaccaaatggcgttttataagccatgataatcattacaatgcccacaataatcaatgccacaatagttactactttgattattgcaaaccaaaattctaattcgccaaataatttcgtacttaataaattaaacgacataagtaacaatacacatgccagtgctgttaaccaatttggaatatctagataccaaaaggatacatatttagctactgctgtcacttctgccatccctgaaataatccatgttaaccaatatgtccatcccgttataaatccagctaacggccctacatattcatgcgtgatatccgcaaaagaattaaattcagtgtttgacaataacatttctcccattgccctcatgaacataaacaacacaaatccaacaataatataggtgagtaaaatggatggtccagctaagtgaatagattgtccagcacctaaaaacaatccggttccaatggctcctccaatcgcaattaactgtatatgccgattactgagttctcctttaatttatctgccattatttctaccccttattcgaaatatttgcacatttttatcatactacttttttcatgataagtatcaaaatacttttaacacaaatgaaatcatattgctttacacttattatttcctataaatatatttacaaacatactagctttgctaatttttaaataaatgttaaattaaaaatattaattattttcaattacaatgttaaagggtgaatcgtatgcgtgcaatattaattggtattcttggtgcattatttttttctgtaacatttatcttgaatcatgcaatggctaaagatgaaggcaattggctatttagtgcttcattacgcttttttatttatgttccccatactttttataattatatacattaaaaagaacctaactaaagtacattatcatattaaaacgcattttgttccatggatgatttggagtaccctaggatttgtatttttttatatgccaattacatttgtcgctaattacagtcccggctggcttatctctgcaacatggcaattaacaatcatttgtggtctactcctcgcgccattattttatgaatatgtgcaaataaatcatcaacaaataaaagtaagagagcgtatttcttggcgctctgtaggtacctctagcattatggtcttgggtgttgtacttgtccaaatacctcaagtttctcatattgaaatacaagtttttatcatgtcggtacttcctttaattataggtgccttttgctatcctttaggtaatcgtaagatgatgattcttgtggataatcaattaaatacacttgaacgtatttatggtatgacgctcgtcacactacctatatgggtggttatatttatatgtggtgtattgaagtccggcccgccttcttctaatcaacttttacagacatttatcgtagccgtattctctgggataatagctacgacactctttttctatgcaaccaatatggtaaaacataaccaagcaaaacttggagcagtcgaatcgacacaagcgactgaaatcatttttacattaattggtgaaatgctccttttggacttaccgcttccaagcacagttagtatgatagggatcatcataattacattaggtattttcatctatagtttcatgaacagcataattaaggaaaacaataacatgacactgtaattcaaatcacaaaatattttgggacaaagttttatagtaaggtttttaaacgtattgcttaatttgtaatatatgcagttcaaatcattcacattgacatctcgttatgaaagcaagataatttgtttgaatacataatcgttttataaattagaggaggtatgaggtcaatgactacaacacatgttgacccaagagtaaccagaactaaaaagttgttgatggacgcctttcgtgaaattgctaaagaaaaaaaattacaaactataacaattaaagacattacggaacgtgcaacggtaaatcgcgctacgttttatgctcatttttatgataaatatgacattatggattatacgctctcagaaactgtattaaaaaatttaaatgatgcattagatgtttcttcagaacttaacgaaacgacattatcttctagcttcattacaattacgagttatattcaagaaacacataatgaatgtaaattaaatagcgaagcctatggacaagttgttgaaaaaagagtcaaagaagagttagaggatatctttttaacattgcttgtccaacaacatccaaatgacccaagagaatctcttgcggcaagtgcgagatttctttcatgggggttatacggtacagctaagcattggtttcatagtagtcaattatcagcaaatgattacattgagggtgcactaccctttctaatgaaacagattttaaaataaaaatccacgtcaggacttattaggtctctgtcgtggatttcatgcttgtaccttttattaacttttattcttattaataaagctcaatacatcatctgtcatagctacggcactattactttcaccttcaataccaccttggtgtataccaatcacttcattattttcgttaaatacaggagagccagaattacctccgaatgtactcgcattatattcaaattcagtagtgttcgtattcagtatttggcccttactctcccacattgtagccaaggacttatctcctggataacccgttacggtaatcggcatatcttttgttaccgctgaggcatcttttaaagtcgccggttgaactacatctccaactgattgctcatctttatttttatttaaatgtataagcgctaaatcttcatttcctgggtacacttcaatttctttttcagaaaatgtaccataaggcatcgtattttcattttgggcagctggtgaaaaattcatattcccttcagaaaggttggcaacgtgtttattagttaacactgtatttttatcaatcacaacacccgtcgcaatattatctccaatactaatatagccaacagattgataatgaccatttgttgtattttctatttgtgttctatcgtcattaggtaagacgactcttgtcttaatttgattggtaccgactttagcgtcttcagactgagctgactgatcagtcgattgatgtgtttgcgttgctgcatatgtatttccatttatcgagatcacagtacataataaagctattatgaatatgagaccacctcgtagctttcttttaagcataaacaacctccatcaaaattttttctatttcaatttaatgaattttcggataataatcaaataattgtattatcgttttagaaatttagcttttaaaataataaatatcatttaaattcaactgacttttttagtgaataaacatgttgtttgcattagttaacaaatcagtatacaatgcatttatacaacacgtgttagttagttatcaggtgttgtaaatacaagttaaggagggatagacgtgacaacaattcaaaaacacaatggtttcaaacggacttttcaacaaggccatttaactttgggattaatgctgccttttgataattctgaaaacatcgcattgtcgtttgaaaatcaagttgatttagcacagtatgctgaaaatcttggatttacaagcctttttgtgagagataatccactttatagtccacatttaggtaatgtaacgacaaactacgatccgtttgtatttttatcttatttaagcgctaaaacatcgaaaatcgctctcggaacatctagtattgttgctacattgcgtcatccaattcatacagctaaagctgcaacttctcttgacttgatatcagacgagcgatttttattaggtttagcaacaggagatcgtccatttgagtttccagctttcaagataaaagaaacgcaattatcaaagcaattccaggatgcgatctatgcaatgaatgatttgtggcaatcacattcgccaaaaatatcaaattcaatatttgaattatatgaagattcaggtcttcaaatattgccaaaacacaatcatatacccatgtttgctacaggatattcgcgacaggaactctcctggattaagaaaaatatggatggccttatgttttatccacaaccatttcaaaaacaaaaagctttattaaaagaatggcataacaatgatgtattcaaaccatttatgcatccattagttatcgacttatctttaaatcctaatgaactcgttaaaccaattaaaggtggctaccgtttaggtagaaatactttattaaacattttaaaatcatatgaaaaaatcggtacaaatcatatgatgttgcatttaacatctaatgatagaccatataaatcactattaactgaggtcggcgattatattattccacacttcccacctcatttatcacaggaggaaaaaaacaatgacattactagacagaattaatgaacttgcaaataaagaaaaaatagaaacgttaagcattgaagaaaaagaagaacaacaaactttgagacaagaatatttgaaaatgatacgtggacaagtaatccatacattttcaacgttaaaagtagttgatcctttaggtgaagacgtgacaccagacaaagtttaccaattaagagaagaaatgggtacacttgatatagattaatttaaatgaatcatctagagatacttgattgttatgagtaagagcctgagacataattagatgcctcaggctctttttcgtttaggcagtagatgactgaattgaaaatgtaacgtctcacttgtttaaagaaacgatgttttcatttttatggacacaaatcattctgatgtatcagctgaaacttagctatgccacataaaaatgctagtgagattgatgtatgaacgttagctcaggcaaacctttatccgagtcatccttgccttgattgcatagataggcatacgaaatctctattagaaaatttgatttctatcccacttccttattttattgatttaatattttttgcattgaacgatcaacactacctgcatacatttcaccaaatttaactagatgtaccattaaaagatacaatctataaaattctaagcgcacatctgctccctcactcagtggatagtgcttatgataagcgtcataaaatgcttgcgtaaatcctccaaacactgaagtaatgcctatatcaaattctctatccccatataatggtgcaggatcgaatagcgctggtgaaccatctgttaaaaacatgtaattaccgccccataagtcgccatgtaataatgaaggtttgctattatgactttctaattcatttacaatcacacgacgtactgcctgatattgagtgacatctgcgtctccccataatccttgttgcaccaatctatctttgagcttatctaagcgtttttctacaaacaaggtaatccaactattcgtccaactattatcaaatgaaatatcgccaccttcataaggtaaatcaaaaccaaattgattatctgcttgttgctcgctatgcatacgcgccacaagttgtcctaatgcttcttggctacctgacacgccttcatctaaataagttaatagtaaataagcgtcatcttcaatttctccactatcaatgactctcggtgcagtaataccgactttttcaaataaattgagccctgcaatttcggcatcaaaaaaagttgactttctcttacgttgtactagtagaaaataatcttcctgatccgtttcaatacgaaatgcatcattaacatctccaccacttacaggaacgatatttttaatatgacttaaaggcaattgtgattgccacgcttgattcatgaatcatccctccactaatctcttaaaattaagttatatatggttatttcctttttcttatctacttaatcatacaaacctacccaatgatttctgtgaaacttctattaattatttttatttggtctaggcatatattccgtaaaatgctagtctattaaagacatcattttcaattcagcttttttacatattgaacttaagatacataaatatttttaattaaatttgataaatggagcgatcactatatgtataaactcatcaaaccaatgttatttcaattcgatcctgaaaaagcgcatggaatgacgatagacgcgcttaaatttgttcaaaaccatccaaaattattaactgtaattaaaaaaatctttcattacgaaaacgactcattaaaccaaaacctcaaaggcattcactttgcgaatcctattggtttagcagccggcttcgacaaatcttgtgaagttcctaaagctttagaaaatgcaggatttggatcaattgaacttggtggtataacgcctaaaccacaaccaggtaatccaaaaccgcgtatgtatcgtttagttgaagatcaagcactcattaaccgcatgggatttaacaatttaggtatgaataaagctttaagttatttacgcaagcatcgttatcaaattccagtcggtttaaatgttggtgtaaataaatccacaccttatgaagcgcgttatgaagactacatcaaagtgattgatacgtttaaaaacgacgtcacattctttactgtcaacatcagctcacctaatacagaaaatttacaaagcttccatgataaagatgaattctcgcaattatgcgaagctattcagacatataaatataaagaaagccttaatgttcctattttcataaaattaacttctgatttatctttagatggtcttggtgcaatgttaacaccaattacgcaaacttttgatggcattatactagccaacacaacacaacaacgtgaagcactgcattcaaatcatcgtgaagaaactggcggtttaagtggcaaaccactattcgagcgtaatcttaaactcatttcttatgcttataaacaaacagatggccaatttttaattatcggaactggtggtattttcaacgcagaagatgtcataaaaatgatgcgccaaggtgcatcgctagttcaaatttatagtgctttagtatttgaaggtccaggactaactcagaaattgaataaacaattagcacattatcttaaatcaaatggctacaacaatgttaacgaaattatcggtttagatgtaaaataacgctatgctaacaagcgtcatcctatttatttaagcaatcacttaatcatcaatattaaattattactttatttttaatagggtatatgaataaaaaggaggcgctatcatgtataagaaaatattattagcttatgactttgataattcgttcaataacgtccctaaagaattggaaaatttaaccaatggcgttgaaaatgctgaagttacagtatttaatgttattccagaaagtgaacttgaaacgtcggtacgttacgataataagcattttgaagatttagcaaacgagaagaacgaagtgctctcacctttcattcaacaattagaagcactcgatttaactgtcacggttaaatttagcgcaggttatattaaacaagcgattttgactgaagtgaaggaaaatgcatatgacattatcgtaatgagtaatacgcgtgaaaaatctgatatcaagaatatacttggtaacgttacacacaaaattgcaagtaatgttgacatacctgtattaattgtaaattagcaaataaaaactcaatttcagttataactcgcctctattcattggcaggtataactgaaattgagttttattattaaatgcactattgttgaagatatcgttcaatcacttgtaaaacacctgattcatcgttagacggtgcccgatgttttgcaatcgctgctaattcatcactgcaatttgccatagcataactatgtatggttaaaccgagcatttctaaatcattattggcatcaccaaacgcgagtaattcgtcttgctgtatgtcccattcttttaacaattctttgatcgcaacgcctttattcacactaggtaagattaaatccacactgtcatttccacttgtcactgcacgtatcttccctttataacgttgttctatttcgttagtcacttgcttaaccaagtcttcatctttaatccgtaaagctatttttacaaagtgatcctctgtgatttcattaaatgaagctacttttttgatatcatagtaataatttcgtataaaatttaggaattcgtcgctactctcatcacttacatatgctgaatgtataccacttaaaacaacatcactgatatgatacgtttgatgaatcatttctaaaacttcaaatatgagttgttggtcaaaataatgtgctgtcaacaatgcatcattttgataagttaccgcgccattttctgctacaaaagtgatattatctaccttgtcaggaaaaaatgagcgtaactgtgcatattgattaccactagctacgataaattttatattttgctgtacaattttttgatataaacgatcaaaatatgctttgtcataggtatggtcagatttaagaaatgtaccatctttatctaccgcaattgcttttatcatactgatactcccttcaatactgtatataaatgtttacgttatagtttaaattacattgcgataatattaaataagtgtccatcaatatcgctaaatagaccaccataaaagccttcatgttttgtaccacgttgaagtacttttccacctgctgtttcaacaagatttaataagtcatctacctctgctgcctcttttacagaaactgaaaccaatgcttcatgtctaactatatcagattgttgcgccactttttcaaattgaccttgctcaattaacataatgattttataatctgctgtttcaatacctctcattttgtctaaaacagcttcattctttttaatcgtaaacccaatattttcaaagaaagtcgcactcgcttttaaatcttttactggtaaattaagccatgatgattgtatattcataataaataccccctatttcattcaatctcaaatttaatattagcttaccatttgcacttgaataaaactataaatcactgtttttaatataaataaaaatacatcctttaagttaagaccatgtgcctaactttcgggatgtataaattatttttcatcagagcattctattataatgaggctaaataaaaatactttttgaaaatattaatgcgctgctaaaagtatgtgttaattagctttattatcacctttctaaaaatttctaggtaatcatctactggtattgaacactgcttaacaaaagttcacataaaagtggtatttttgtgtatatttacacatatttttataaaattttctgaatatttagatatatatgtgctatgatatacattatcataaattagttattaagttttacgatatattattcattgggagaggttcattatgaaagttttttttaataagattttaaaaagagaagatccttccgtctatcaagtgaaggatgcacatttaaatagaacattacgtgtaaaagatttccttgctttaggtgttggtaccattgtttcaacttctatttttacattaccaggtgtagtcgcagcacagcatactgggccagcagttgcactttcgttcttattagctgcagttgtagcgggtctcgtatcttttgcttatgctgaaatgtcatcggcaatgccgtttgctggttcagcatattcttggattaatgtcgtatttggggaggtattcggttgggttgccggttgggcattgttagctgaatactttatagccgtcgcctttgttgcctctggtttttcggcaaatttacgtggtctcgtctcaccattagggattgaattacccaaatcattatccaatacattagggacagatggaggcatcattgatatcgttgccgctgtggtcattttacttactgcttgtctcttgtcatatggtgtttcggcagcagcacgtattgaaaatatactcgttgtaattaaagttttagctgttttactatttatcgtagtaggtttaaccgctattgatttaagcaattatgtaccatttatacctgaacataaagtaactgaaacaggttcctttggtggttggcaaggtatttatgcaggtgtatcaatgatattcttagcatatattggttttgattcaattgcagcaaattcggctgaagcaattaatccacaaaaaacaatgcctcgcggtatcttagggtcattagcaatagctgtcattctatttgtcgcagtatcacttgtccttgtaggtatgtttacttattcagcttatgctgataatgctgaacctgttggttgggccttaagacaaagtggttttggtgttgtggcagctattgtgcaagcaatttctgttattggtatgttcacagcccttattggaatgatgttagctggctcacgtctactatattcctttggtcgtgatggtttattaccttcttggttaggaaaactaaacaagaaaaatttacctaatcgttcattaattattttaaccgtgattgcagttatcattggctctatgttcccattcgccttccttgcgcagttaatttctgcaggaaccttggtcgcatttatgtttgtttccattggtatttttgggttacgcccaagagaaggaaaagatattccgatgccagcttttaaaatgccattctaccctgttatgccaatcatcacgtttgtcagtgtcgttgttgtattctggggcttaggtgctgaagcaaaattatacacactcatctggtttattattgggttgctcatttaccttctatatggtgtgaagcattctaaaaaacgtcaatcttaataatacgaataaaaagggctaaaacatgcgtacatgttttagcccttttatttataaaacactcgttttatcattcaaccaaatatttatactgctgtttatttatcaacacagctatcgttatagcttacatacaccattaatctatactatctatttgagaaagcttacgaatattagaaaagctcacttttgagattagactttcatacgtgttcaaagctttttcagtaatgtcctgcccttcctcagttaaataaatatacatcgcccggtgatcttcaagacattcttgtctcactactaatgctttcgttggcttttctattcttacgattaaacgtgacattgcactttggcttaaatctacaattttaatcaaatcattaattttatattttttccctttagctttgtaaatctcatacaacacataaaattcttttacactcaaattgtattcttgcttcaattttttctcaatcatcgtatcgatatagtttacatatttcgtgagctgtacccaattatcaattttctgttgttttttcatcgtatcctcccaaagatataagcatcgttttaatacaatgtgattttatttatgtaaatgataacatttatttaattaattctctaaatacattttttgtcttaatataggatgtcaccttataatgtttagctcaaaaactatgacatatgcatctttctttatcatcttggcgctgttaccaaaataatgatcattgatacacattgacatactcaatcaaatagaaaaactgccgcaaagtttaacaactttggcgacagttttaagtttacttcactaactaatttgttttaaatgactaatggtttaataatttttcttttaagtctttacgttcatagtctaatgaatatggatcatttaaccagtagataccttcatccactttaaatgttttaccatttttaaccgcttctgtatttttccaaatatctttattttcgaatgataaatctgcacctttggcaactggtgtaacaacataatctcctgacatttcaggaatttgttcttcagatatatcagctaaatcatttttcttagtcgctttttctactttttcaggcattttcaaaccaaatgaatcatatagaatttcactaccatgaccatatgttttacctaatgcatagatttttttgtcgaaatctttaatgatagatacagttgtatcttcaccgatggcatctttaatttcattaccatcatcttttgttttttcttcccagtctttaatccaatcttctgctttatcttctttacctacaattttacctaactctttatgctgttctttataatcatgtttcatataatcaaaagcaatagttggtgcaactttatttaattttttcaaattcttgtcagtgttgtatgtaataatcaaatctggtttaagtttcgctacactttcaacattttcagcatctactttatcaacatctttaaatttgtcttttaacactttactatcatctacaatgtttgcgacacccacgatatttgcatcaagttctttcaatccacctgcatatgttgcacctaacactacgatacgtttaggatctttaggtatctttacttttttacctgaatcttgtgtatacgtcttttcttttttatcctttttcgaagcgtcatcacttgaattattgccacacgccgctagtattaacatcagtgctagcaacggaaatattaattttttcatttatctttccccttttctcatcttattctcaattatacattattatatattaatctcaatcatatatattaatctcaatcatatatcacgcattatttttgaaatttaaatatattttattatcgaaatttaaaaaaatactactttctaataaatagaaagtagtgttttagtatattcatgacgcgtaacattaaataaatctttagtttcaaaatcatctacaatttcaccatttttcattacaatgaatcgattaacaatttgatttagaaacgcaagatcatgtgatattaatatcatgcctttatgtgttgttttataataatgccttaatatatcaatcatacgttgttctgcaatgacatctaagcttgctgtaatttcgtcacaaataagtatgtcaggttctaacattaatgtacgtatcgtattaaaacgctgcaattggccaccacttaactcttcaggcaatcgatccatcaattttgtatctaattgcatataggccattaaatcagacaagcgttgcgccgccttttgtgattcccctctacgttgatactttattggctcttccatagattttctaattttaaatttaggattaaagctatctacagcatgttgaaatattggtaaaacgcgttccttatgcgtgataacttcaccatgtgttggttgaagtaatccgagcattatttttgctagtgtcgtcttaccagaaccactttcaccaacgattccgacaatctcgtcggcttgtatggataattgaatcttttttaaaatagcttcatgtttatagctaaagctaacgtctgttaaattaagcatggtaatcccctttctttaatcgactacgggaattaaataattttaaactatacggtttaacatcattatttttaaaagcatcaatatgattggactctaccatttcaccatttttaatgacatgaatccagtcactaaaatctaatacatgcgatagattatgtgttattaacagcaaagtcactttgtgtacttcagccaaatgtttaatcaaattcataatactcacgcctgtaacagcatctaatgaagctattggttcatcggcaataatgaccttaggattgagcattaatacgctagcaatttgaactcgagctaattgccctccagaaaggctgaaacggtactttgacatcatttgagaaggatttaattcgacccatgatagtgcttgttccacaattttttgcgcaccttttttatctgtcttgtaatgttgtctatatatagaaatcaattgtttcccaagtttcgtatgatcgttaaagctgtgtgtatagttttgagaaataaaaccaatttctttacctaaaagattgtgcatatcagacatctcactatgttcataagtcatgcaatcgtattgcatatctagtgtgttcggtatctgttggaccattgctctagctgttaaacttttgccagaaccactctcaccaattaagacattcactttactttttttaagacctaaatccacgtgttgaatcagcttattaccaaaacgatctgctatagataaatttgttatttctagtatattagtcattcacatcacgttgtcctttcaataacctatctctcagcgcgtcgcctgctaagttaaataataaaatcgtaacagtaattaaacaggctggcacaataatcagtaatgggtaggaactaatataatatctgcctacattgagcatcgcgccccattcaggagatggtggttgtgcacctaatcctaaaaatgaaagtgaagaaatatataatattattttcccaaaatctaccgtcattaatacaataatagatggcatcacttgcggcataaaatgtttaaaaataatgacatgtgtcggtacatgaaataaccttgccatctgtatatatggtttattgatttcactactaactactgatcgcgttaatcttgtataggtcatccacttgataattgtaatcgcaatgacaaggttccaaatactcggtttgaaaaaactagctaatgcaatcattaacacaaactcaggaatgcttaatccaatatcaatcaagcgcataatgaacgtatccacgatacctttcttatagccagcaagcaggcctaatggcacaccaatgataactgtaataaacagcgtaattaaacttataatcaatgtatatctagcaccgataatcactcttgaaaataaatcacgtccgtaatcatccgtacctaaccaatgtgttaaatttggcgtttccaaactactgcctaaattgacttcgtatgcactataagacgatacaaaaaactgtgcaatgataagtacaacaaaataaatcgcaaatgcataaaatatcatatttcgtcggttaatctgcttcataatgactcaccatcctgacgtttcatgcgttcaatatccgttggcttgttatatcgtcgcttgggatcaatccataataacagtaaatcactcattgtatttgctaatacaacaaagaaaccaatcatgataacagcaccttgaacaacagggtaatcacgtgctcgaatactatctacaagaaaatgaccaatccctggtataccaaataaattttctatcacaacagtaccaccgattagactgcccacagacatacctaacaccgtaatgattggaataattgctggtttaaataaatcttgccataatatataacgttcagacatccctcttaatcttgctgcttccacttcttttgattggtagagttcgactaaatttgaacgcattaaccttacgtaatatgcactcataccaacgcttaatgcaatgactggtaatatatagcctgccattgtatcaagaccagaggacgggagtagattccacttttgcgcaaacacataaatcaatatcgtacccaagaagaaggacggtatacttactgtaaaagatgtcacacttcttattaaactgtctaaccatgtatgatagtactttgctgcaatcatgcctaatggtatggctacgacaaacacgacaactattgtcatcactgcgataaataatgttggcggtgtatagtaaattaattctttgataacgggttcacctgtttgataactggtcccaaaatttaattggataatttgcccgagccattgcacatactgaatgattacgggttggtctagcccaagttttgctttagtcgcttctatttgatcacttgaaacatttgctacatccaaatgtaatattttatctataggatctcctggcgtaagtttcattaaaataaaagtaatagtagaaaggacaaacaatacaatgatcatttgtccaattctagaaagtatattttttaatatcatttcgctttatcaaccttataatcaatgagataaatgccttcaggcgttgcttttaagtttttaacttttttattcataccgacaatattatccatataagtaagataactattggctttatctttatctgtaatatcgataatttcattagttagtcgattacgttcagttttatcaactgttttattgaattgatcaatcagtttggttactttcgcattgtcatatccacctgcattgattgcaccctcaggcttatacgcttgattaaagaaataacccgtatcacctctaggaatcgttccaaagctatacattgatgcatcccattggctcttgtctttaagataaccctcaatatcatctacgttacgaatcgtaatatcaatatttgcttttttagcatctgattgaagtacttgagccatttttggaagctctggacgtccgttatatgttgataccgttagttttaaaggatgtgctttcgtgtagccttgcgctgccattatttttttagcttcatcaatatcttgcttttgtacctgttgtttatcaataaaatctaattttgtattaaatggcccagtggcaggtgtcgcatgattcttggagacatttttagcaatgctttctctatccacaactttgtcaagggcttcacgcaccggtttcgtcatttttttacttgtgtggttatacataatcaaggacgttctaaatccagaaactgaagatgttgtcgttttatcaccttgatttaatgttttttctttttcgactggcacatctgtgatgacatcggctttgcctgaacttagattacttgaacgcgcattaccatcttcttgatatgtaacatttacatggtctaattttggtttaccttgccaataatccttaaattgatctagtttaatattttgagattgtttgtaatctttaatttggtatggtcccgtaccaacaggcgctttcgttacatcactatccgcttttgtatcgtaaatagccgaaaatggactagccaattcagatactaattcaggataagcctctttggtagtgatacttacattttggccatctactttaatttctttaattggtaatgagcctttaacgagatcacttttttttatactttcctcaagactcgcctttacagcttggcccgttacttttttaccattttgaaatttaatgtcatcttttaatttcaaatctaattgcgttggtgatttctggttatacgtatctactaaaagtttttgtactttaccattcgcacctgctttaaatagtgattctgctgagcctatcttaacaggtacatctgtttcgtaaggtgctatagaagttgtctttagtggcaattcgacattcaatgttttaccttttgattcattacctgatccactgcaacctgccaacacaatcgctgttgttgctaatagtgcgaccatttttttcattcatattccttcttcctaataaattattaatcacttagaaaatatacttatgactttatcttgcataacattcattattaataacctatgattatatttcttgcgctttcatttgattacccgcaaatagcattatccacgttgcgataataaacggcagtgtaaagacagggagtccatagggtgttaataatgtcgtcatacctgcatggattaccacagtcagcaatatacctaaaacgatactaattggtcgttgtattctagttcgaaacgctatgcctagcgctaacacagtgagtatcacattatagccgaataaaccttcattaatttgatcatgatttgcacctaatacaatcactgctaaaaatcctattaaattggctactatcgcataaacacccgcttttctagatgctataaaaatgccgattaatattaacgtgcccgctaacacacttttcaataaaaatatttcactaaatccggataaaaaagcattgataaattgaatatgatgacccgaaaattgaatttcctgtatcgcattgggaagaatatttacatcagcatttacgaatttaaattgaaatgacatgagtaaaatgagccaacttacgaacacataaggcatcgttaacataggtacaccaaaaggtttaaagaattctctaaatgcagaaccgattggcatcgtaatgatgattgcaactaaaataataattaaactgtaccattttggcactaaaaataatgtcaatgcaattgctgttaatactggattaaaacctgataatcctgtattgatttcttcttctgaataattagtcctttttgctagtaacaatgcaatgacgctcgctatgagtgccatcacacccaccttccagctacctataaataaccctagcaaaataaataatcccgtccatgcattatttagcagtagtacttgtgagatattcttcaatacaattcgaatcgcatccacattgtcacctgatttctatatattctgacttaaacaataatatatgagaaatacaaaaaattaaagcaatatatatcatgattttatttaaatgttttttaattttgtggaatgtaatggtttattcttgtagttccaaattaatcgtcttattattaaggtgcacatataaatttttatgtacacaattcaatttgtcgaaaggtagtgagattgtgcattttacacaacgtgaacaagataaactgatgttggtcatcgcagcagatttagctcgcagacgtcaacaacgaggtttgaaattaaattatccggaagctgtagctattatcagtttcgagttactcgaaggcgctagagacggaaaaacagttgccgaactcatgagctatggtaaacaaatattaaatgaagatgacgtgatggaaggcgttgcagatatgttaactgaaatggaaatcgaagcaacgttcccagatggtacgaaactcattactgtccatcacccaatcgtttagaggaggattaaaattatgaaacctggtgaaattatagtcaaacgtacagaaatcgaagtgaatcaagggcataatgcaacaatccttaatgttaaaaatacaggcgatcgccctatccaagttggttcacactatcactttttcgaagctaacccagcgttacaattcgatcatgaaaaagcctatggcaaacgtctagatataccagcaggcgcggctgttcgttttgaacctggtgatgaaaaagaagtacaactcgtagaatacagtggtaaacgtaaaatctacggttttcatggtgacgtaaatggttccatcgatgagtcacgtgtttataaaccagaagatgataatactgcaacagaagtcattgcagaacaagacaaaacgagtgaaaatgctaacaaaggaagagggtaaaaagtatgagctttaaaatgacgcaatcccaatatacaagtctctatggaccaactgttggtgattctgtaagattaggcgatacaaacttatttgctcgcgtagaacgtgattacgctacatatggagatgaagctgcattcggcggtggtaagtctatccgtgatggtatggcacaaaatccaaatgtcacacgtgatgacaagcaagttgctgatttagtcatcacaaatgcgatgattattgattacgataagattgtcaaagccgacatcggcgttaaaaatggctatatcatgaaaattggtaaagcaggcaatccagatattatggataacgtagatattattattggtgctacaacagacattatttctgctgaaggtaaaattgtaactgcgggtggcatagatacacatgtccatttcattaaccctgaacaatcgcaagttgcattagaaagtggtatcacaacacatatcggtggcggtacaggcgcgtctgagggtacgaaggcgacaactgtcacacctggaccatggcacttacatcgtatgttactcgcagcagagtcattaccgttgaatattggctttactggtaaagggcaagctgtaaaccacacagctttagtcgaacaaattcacgctggtgcaatcggcttaaaagtgcatgaagactggggtgcaacgccttcagcacttgatcatgctttacaagtcgcagatgactatgacgtacaaatcgcgttgcacgcagatacgttaaatgaagctggtttcatggaagaaacaatggctgcagtaaaagatcgcgtattgcatatgtatcatacggaaggtgctggtggtggtcatgcgcccgatttaattaagtctgctgcgtatgctaacattttaccttcttcaacaaatccgacgttaccttatactgtaaatacaatcgatgaacatttagatatggttatgattacccatcatttaaatgcatctatccctgaagatattgcgtttgcggattcacgtattcgtaaagaaaccattgcagctgaagatgtacttcaagatatgggcgtatttagtatggtaagttctgattcacaagcaatgggacgtgtcggagaagtaattacccgtacttggcaagttgctcaccgtatgaaagaacaacgtggattattagatggcgacagtgaatacaatgacaataatcgtattaaacgctatatagcaaaatatacaattaacccagccattacacatggtatttctgactatgtaggttcaattgatgaaggtaaattagccgacatcattctttgggaaccagcattcttcggcgttaaacctgatgtcatcgttaaaggcgggttaatcaacgctgcaatcaacggagatgcgaatggctctatccctacttcagaacctttaaaatatcgcaaaatgtatggtcaattaggtggaaatctacaaagtacatcgatgacttttgtttctacaactgcttatgaaaacgatattggtaaacttttaggcttaaaacgcaaattaagacctgtgcacaatatccgtaaattaagtaaaaaagatatgaaaaacaataatgcaacaccagatttagacgttgacccacaaacatatgaagtttttgttgatggagagaaaattacaagcgaacctgctacagaattaccattaacacaacgctatttcttattctaggaggtaaatcatgattatcgaagaaattgtaggtaatatcgctaatctttcagatagtgaaaaaggtaaacatatggaaaaggtatacctagaaaattcagatttagtaaaaagaattcaacgcgttacaacagatcatggtaatgaaataggtatccgtttaaaacagcctattgatttacaatacggcgatatattatataaagatgataaaaatatgattgttgttgatgtaaattctgaagatttactggtaatcaaaccacgtacattacaagaaatgggagatatcgctcatcaacttggtaacagacatttaccagcacaattcacagaaactgaaatgctcgttcaatatgactacttagtggaatctttattaaaagacctaggtattccttatgaacatgaagaccgcaaagttaacaaagcattcagacacataggacattcacatgattgatcatgcacacctacgcctgtttcaattttgcgattcgcaattcccaacaggcgcattcagtcattcatttggacttgagacatatatccagcgtgatactgtccatgacgaagaaagtttccaacaatggctcgtgttatttttaaatgagcaattaacatatgcagatggtttaacaatgcgtttagtgtatgatgccctaaatgaaaatgatacaaaagcaatattgaaattagatcgtattctttttgttcaaaacttaccaaaagaaacgagacaaggttcaaaacaaatgggaaatcgcatggttaaacttgcgtctgaattatatgatagcgattggattaattggtatcatgcccaaatgaaagataaaaaagcatccttgcatcctgcaatttgctttacaatgcttggtcaccatctcggtgtcgatatcgaaaccatcattgactattatctatatcaaaatgtgtccagtctcactcaaaatgccgttcgtgcaattccattaggacaaactgccggacagcgtattgttcataaaatgattccaatcatgaaagaaacaagagaccatatcatgacaattcctgcgtcacagctcggtattacagcaccaggtttggaaatcaatcaaatggaacatgaaaacgtaaatgtaagaatttttatatcttaggaggacaagctttatgacagatacaattaaaataggtgtcggcggccctgttggtgcagggaaaacgcaacttatcgaaaaaattgtcaaacgcttagcgaaagacatgagtatcggtgtaattacaaatgatatctatactaaagaggatgagaaaatattagtgaattcaggtgtcttacccgaagatagaatcatcggtgtagagacaggtggttgccctcatacagcaattcgtgaagatgcgtcaatgaactttgcagcaatcgatgaattaaaagagcgcaatgatgatattgaacttatcttcatagaatcaggtggcgataacttagctgctacattcagtcctgaacttgtcgacttttcaatctatattatcgatgttgcccaaggagagaaaatcccacgtaaaggtggccaaggtatgattaagtcggactttttcgtcattaacaaaacagatttagcaccttacgttggcgcatcattagatcgcatggcagaagacacgaaagtcttccgtggtaaccgaccatttacttttacaaatcttaaaacagacgaaggcttggatgaagtcatacaatggattgaacaagatgtatttcttaaaggattagcctaaatgtctaacaacaaacaagcttggacaggacaattagatttatccgtttttaacaatggtaaaaaatctgttgctagagatgtcttttttgaaaaagccttaaaagtcatgcgtccagtctatctaaatcaatctgatatccccaccttctatatcgtcaacgtaggtggcggatacttagatggtgaccgctatacgatgaattttaatattgattctgatgctaaagttatattaacttcacaaggtgccacaaaaatttataaaacattgaatgatcatgtcgagcaataccaaacctttaatataaaaaataatggttatgctgaatatgttggtgatcccattatagcctttgaaaacgcaaagttttatcaacacaatgtattcaatttggaatcaactgcgtctctattctatacagatattcttacaccaggttattccaaatcagataaacgttttagttatacgtatatgcacttactaaacgaaatatatgtagatgatgcattggtaacgtttgataatatgttactcgatccacagaaacaaaatgtggatggtctaggttatatggaagattatacgcatctaggttcttgttatttcatccaccctagcgttaatcaaaaatttattgaacaagtttatgaggaaattaaacacttccaacataaatatgactgccgttttggtatcacacatttaccaactcacggtttcagccttcgtatcttatctaataaaacgcaagtgattgaaagtatcataactgcagttcaatgttatgtcgtcaaacaaatctttgaccgtgatgtagattttttaagaaagtattagttttaaaaaaagggctggaatcatttccagtcctttttattatgaatatgcgttctgttatattattaacgttcaaagtctatttcttaaatcaggttaagtagccaaactaagcttgctacaaataatacaatagtaatgagataaatggttaacttttgtcctttagttaatgctttttcttcttttgtaaacaaactaaacatggtaccatctttgcccattaataatgtaatagaataaataagaaagacaatagaaataatgaataatattaaggcaaccaataccatatatgtcccccttttccagttgtaaatttttctagtaagctaaatatcatactatcttacattatgcattttataaagaattaactatttttaagcctcgtaaaacaaattgttaactctgttcatacataattgatacaatagtacaggcttataaaaaataaaggagtgatttttgtgacagatgaatatatctataaaaatacggtacagccatcttggatagacaataataatcatatgcatgatgcgcaatattattccattttcagtgatgctgttgtaggcttttttgaatctatcgatttctccacagattatcgtcatagtcaagatgtgacaatgttcagcgtagaagcgcatatttcatttttaaaagaacttttactcgatgaatccttctatattaaagtacatatttacgattacgatgccaaaagagtacatttattcttaacaatgtataatagcaacgatgaacgcaatgcaacatatgaagccattatgatgggtgttggcaatgaaacaagacgaagcatggactttcctaaacccatccaagaaaaaatcaaacactattttgatcaacaaaacactttcgacgtacctaaacaactcggacatgtcatcggcattccaaagaaataactacgcttggttacgacaactaaatcatgcaaatatcatccgacgctattagtaaagctcaatacactttataatcagataagtgtattgagctttacgctttttttgacattctcattgtgcgttgctagaattaaatagaatgaccattctactttgaaagtgtgagatatatgtcacaaaagaaacaagatatcttgagtgtagcagaacgcctattttatgaatatggttttaaaggtgtaggtttgaagcaaattatacaagaagctaatgtcgcaacgatgacgctatataatcattttgaatctaaagataacttagtggctcaagtactgaaacagcgtgaaacacgttattggcactatctagacagtcacgttgaacaacatcctgaaaaaccttttatatcagcagtcacggcgcattgtcagtggttaaatgattattcgtataaaggtgatatgtttatgcgtgctattgaggattatgcagacacggataatgagattgaaagtacagcaagaggtcacaaagaaagactgttacattatttagaaaaacttgctgatgatgctggtattgaaaa

SEQ ID NO: 26 - DNA, 26683 bp, Staphylococcus saprophyticus
acataatcgccaactttcaagtcttggtaagatttgattttttcagcgttcgttaacgttttatgctgttttggttttttcttttgttttgatttaaataattctctctctgtgacaacaactaattgcatgtaaggtagctcaaaaccttctgacaaactaccttctgtaataatggcactgccaccttcatttcgacgacttggtgtatcaataaaggtaggtatatgcatttcatttagcatagattgaatgcgttcttttttcgtttccgtttctgcaagtacaacaatcgtgtaatcattttgaataaatctttggaattcagaacgcataatatcatactgtccataaaactgttgtactggtttacatgaaaatttaatgatttcatttaattgaacaggcatcgttgctgtaaacaatgtaaagtaggtaaccgcaaacggttttaataaattttcaaaaccttcatattgtagaaaactttgatcaataaaaccttttccactttcaattaaattttgcataaattcatctatttcagttacaagagttgtttcagtttctttaattctattatattcatctacagcaataatggcatcctctttaaagtaatccataatcgttgctggctgttcatacataaatgctactagtctacgaagcacttgatgatcaaacatttctgcttcgaataattgaaaactttcataagtttcttttaattcatttcgcacagacttttcaatttttggacgtgtgtcttcatatgcttgctttagtttatgctttgtatgtttaagcacatcttcggtaatgatatagtcactagcagttgtgatatcaacatgttcgatattgccttcagaacgttgagattctacatcaaaatcacgtatagagtctacttcagtatcgaaaaattcaatacgtactggcttaccaattaatgggtagatatctacaatcccaccacgtaatgaaaattctcctatatgtgacacgacactttctctacgatatcccatatttacaagcttatttaaaaattcgtcaatgtcgatatcgtcgcctacatttagcgttaattgatgcgatttccacatatctaccggcgtgagccattttttcaatccgtttaaaggtacgataaataaccctctctcttcttgagcaagtgccgttaatgttcgcacgcgttcactcataaattgagggctttgtgttgaaaattcttctgtcataatatcctgcatcggatatttatatatttcactatcttctacaaattgcagtaagtcactttctaacttatctgcttgataaagattgtttgtaacaacaagtagttgctgctcactattcaaatatttttcagctataatcgttgcttttgcggcaccagatagtccggttactaaaacattttctttaccaaatacttcgtttaactcttggtatcgtttgtcttcatttatatattctgtaattattgatttcacttaatctcaccattatattcattcattacacggtcaaatcgattactttctatataagcttcgatcgctcgtgcagaatgttctattactttattcatcgtttccatttcttgatttgaaaatttttgcaagacatagtctacgatggccatgccatttgaaggtcgatcaacgccgattctaattcgtttgaactggtctgttcctaacatttgaataatggatttcatgccattgtgtccaccagcactacctttttgtctgagtctaatttcaccctgaggtaaatctaaatcatcatataagacaattaaatcctctatatcaatgtcatagtatttcatcaaaggtgccactgcctcacctgacaaattcatcattgtcataggttctatgaacattactttttctccagctaaacgctctattgtgtacgcacctttaaatttttgtttatctaaagaaaatctattttgctctaacataaaatctatgacttcaaagccaatattatgccttgtttgttcgaagcgtttacctatgttgcctaggcctacaatacatttcattacgttacctccactctctgtatgctcattatctaatatttatataaattatatgctttacaagttatgtattttgtatcattcactataataacataaaaaagcacccgcttaacgtattaagcatggtgctttttataggataatattgcgttgatacatcaacacatgacatcaactcaaagagaaagattattcttcttctttttggtcttcgccactttcatcttctttttcttcgcctacaacttctggctcttcagtagctgcttcgccttccattgcttcgatttcttcttcagtaggttcttcagttggaggaactactgttacgattgaatcactagcttcgttttcaatagtgaaatcaccagaaactttgatatcttcaacagaaagactatcatttatttctaattcactgatatcaacttcgattgattcagggatgttatctggagtagctgtaacttcaaggttgaataatggttgttcaacaacgccgccctctttagttcctacagcttcaccaactaattgaactggtacttctacagtacgttcttcagtcatattgattgctaagaagtcaatatgagtgatttggtttttaagtgggtcgaattggtagtctgaaaccattactttgattgttttagaacctacgcctaattcgattacaccgttacgtccaacttcacggataactttgataaattctacttcgtctactttaactgaagtattttttgtaccgtaaccataaacgattgctggtactttaccagtgtttcttagtgttttaaggtctgaacgcgtttgtttaccttgacgaataattgactttaatgaagccatattcagtttccacctttcataaatgctctatctaagagctcctcatttgcccatcaacaatctgttgcttgcaaatgtttatttatcgtgatatttcacgaacgaaatcattatacattgttaaaggctattagtcaaatagcacactaactgattcgcgttcatatacacgtataattgcttgagccaataaccctgctactgataattctttagtattctctggtttacgtttttcatctaattgaatggagtttgtaactacaagttctttaatcgctgagttttcaatacgttcttttgcaggacctgatagtacgggatgcgtacaacaagcataaacatctttcgcacctttgtcttttaacgcttgggcagccaaagtaatcgtaccagccgtatctataatatcgtcaataataattgctgttcgaccttcaatttcaccaacaatattcatcacttctgcaacatttggtttcggacgacgtttatctataatcgcgattggtgttttaagtatatctgcaagtttacgagctcttgtcaccccaccgtggtctggtgatacaacaacacactcttcagggtcgatatctgtctcatttttaaagtattgcgctaaaatcggtacacccattaaatggtcaattggcatatcgaagaaaccttgtatttgaggtgcatgtaaatccaatgcaatcatgcggtctgcgccagcagtttcaattaagtttgcaacaagttttgctgtgattggttcacgactgcgtgcttttctgtcttggcgtgcatagccataatatggaacaacgatattaatgttcgctgctgaagcacgtctacaagcatctatcatgattaacaattccattaaatgtaaatttactggatttgatgttggttgaataataaaaacatcacaaccacgaatactttcttcaatattgatttgaatttctccatcactgaaacgttttacagaacatttccctaattcaattccaacatgatctgccacttcctgggctaacggttcattacccttcaaagaaaatattttcaaagcagaattcttatactcattgtttaacatttatagtcctccaattaattctttcaattcgttttggtttgtagacaaggcaaaacttatatcgctcagcaacataaataattgttatgattatctttaactatattgattttaacagtttaagtaagcttgtctaaacatttgtgtttattttttcaaataaccttctttagtcgtttgtctagctctcgctaacgctaaactgtcttctggtacattatcagtgattgttgatcctgcggctataaatgaacgattacctaaagtaattggtgcaacgagattcgtattacatccgataaaggaatcatcaccaatgaccgtcttaaatttattaatcccatcatagttaactgtaatagaaccacatccaacattcgttctttcacctatttcagcatcaccaatataacttaagtgaggtaatttggctcctgctttcaccactgattttttaacttcaacaaagttaccaacttttacttttttacctaaatctgcacctggacgaagttgtgcaaacggaccaatcgtagcataatcatccactatcgcttcattaatgacagattgtttaattgtgacatttgaacctattttactattcgtaatttccgtatattgtccaataacagtatcttcaccaatcacgctattgccagagagtttcacaccaggctcaactactgtatcttcaccaattctaacatcagctccgatataagtcgtcgcagggtcaataattgttacaccgttcttcatatgctgttcgttaatgcgttttctaaaagctttttcagcttcgctaagcattactctatcattcacgcccatgatttcctcaaaatcattcgtatggaaaacttcaacaataccatgatcttctaaaattaaagaaagtacatcaggcaagtaatattcgctctgtgcgttgtcatttttgactaattctagtttttcgaataggacttgattatcaaacgcaaaaatacctgaactaatttcattaatttgttgctctgcatctgttgcatctttttgctcaacaatactcaccaaacgtccttctgagtcacgtaaaatacgtccataaccgaatggattttctgatgtcgctgataaaactgttgcatgtgcttgattgttctcgtgatgttcaaccaatgatttcaatgttgctgtcgtaatcaatggcgtgtctccacaaaccactaacgtcgtcccttgactttcacttaaatgctcacttgccattttaacagcatgtgctgtacctaattgttcttcttgaaaactataaagcgatgtgtctccaagtgtctctttgacactatctgcaccgtgtccaacaatggtaacaagctgatctattccagattgacatcgcattatctgcaacatgttcgatcatcgttttacctgctacatcatgaagtactttgtatttcttgatttcatacgtgtacctttgcctgctgcaagtactattgcatgtctttgcatgtatgttaaccctccattaaaatatacacttcttacctattataatttaacgctagtcacactttcaaggctcaaagcaccaatgttatataataaaaatatttttattactaatattaaaaaattgcataaccctatttgtcatcattgaatagctatggaaacgcttcaaattttatgcgaaatctataatatctctaatataatataattttttatttacgaaaatatcaacataatcacacttgtatttcttatttttatattatttaaaattaaccaatattcattttattcccatttattttccattccctaaaacaaatcatttctgtcacctttttaaaatcaacactttttatttttaaagcgataaatatgcaaaaaaccagaccgaacatatatgtttcggtctggtttatatcaattagacgttaaatgactatatcgaaattataaaataacttttccataaagtactgcatattcacataaaaaatcagtcacacttatgcatcactttagctaagttatccatttaaatagtcacatctactaaaatagagcaaaaaaatcattttgaaaataaattttccgccctattcggtcgtgtatataacaactattttccctcaaatagctgaacgtattttatttaagcttcttcagaatcgtctgatgattgcgcatttctgtcagggatgacttcatcagtctcttcatatactttcattactgcatcctgtatttcttgtctcatttctgagttaattggatgagcaatgtctcggaattcaccatctggtgtacgtttactcggcattgcgacgaatagacctgtgttgccttcaattacgcgtaagtcatgtacaacaaatgactcgtctaatgtaattgaaacaagcgctttcattcttccatctgtttgtatctttctaagtcttacatctgtcactttcatgtagtgagcccccctagtatctctttgttagaagcttaacaattttattaaaaattataaatccttatttcacttttgcaattaactctatttcaactttaacatctttcggcaatcttgccacttcaacacaacttctcgctggttgatgattactaaagtatttgccataaatttcatttatattttgaaattcattcatatcagcaatgaaaatagtagctttaattactgaatctaaatctgatccagcttggtctaacacaacttttaaattttctaagacttgtttcgtttgctcttttacatcatcgctaacaatttgtccttctaaatttagaggaatttgtcctgatgtgaacacaagtccattaatttctgttgcatgcgaatatggccctaatgcttcaggtgccttttcagtattaataactttcatgatgtcgaaatcgctccttttaagaaaatttagttaaactattgccttgttccaccttaaactcctgattgtattcatctacatcagatagtttaactaaggatgtataatcttcaattaatctttgcttaacttcttttgattctactagtacagatacccctttaacatgagctttaaactcattcatcaaattcataacaccattgattgaacctccagcacgcataaaatcgtcaaccacgagcacgttagaattttctggtaatgttctcttagaaagcaccatcgtttcaatttttctagatgagcctgagacatagttaatagaaactgttgatccctcagtaaccttattatcttttctaataacaactactggcaagttcaatacattcgctactgcattggctaatgagatccccttagttgcaatcgttacaatggcatctatctcttcatccatatacagtgttgcaattaatttaccaacacgattaagtaaagtaggattccccattaaatcggataagaataaatatccacctggtaataaacgatctttctcctgaagttgagcaataacatcatcaatcacttccgtcgcttccgctttactcatttctggtttataggtcacaccaccgctagcacctgccgtagtaataaccgtgccaagcttttctttttgaaaagttgttttaataatttgtacatcttcactaattgaagatttagcttgtttaaacttttgtacaaaatatgttagtggtattaatttgtttggattattcattaagtattgtgtcatatacacaatacgttcacttcttttatagcgcattcatttcatcccttctttttcagcctaacaatcttacaatatgtacttcattgcagcaaccattaaccgcgttatatatgtgtcttgcttgtctctctttcctagctaacgcataaactgtcgggccactaccactcataacagcaccatccgcaccattttctaacatattggcttttatttttaatatttcatcatgcatctttcccgaaacaggttccaagcgatttgaaagacttttacataattgttcataatctccagaaattaaagcattttcacatgcttcagtatgcactgtatgcggttgtgttaaatctaatttcttaaatatatctggtgacgatatacctaaatcaggtttagcaaccacaacccaagcagaaggcggtttatccaaatattcgattatttcgcccttgcccttacacaaagcagtcttacctaatatacaaaaaggaatatccgttccaatttgtattcctaatgcacatagttcctctaacggtctatttaacttatataaacgattcatgcctctcatcgtagctgcagcatctgtcgatccacctgctaaccctgctgacacgggtatgtttttatcaatcgtaatggtcagaccttgttgtaaattataggtctttttcattagttctgcagctttatatgccaaatttttattatcggagggaacataagtctgttctacgtcaacaactatttttttgtctttacgcagttcaaatgataagcgatcgtttaaatctatcgttgtcattatcatttcaacttcatgaaaaccatcatctcgtttaaagagtgtgtccaacgttaagttaattttagctggcgcagtttcataaatcatattcccaccctctttcaatttcgatatggtaataaaatgattttaacatattgttatcattgtgttgtcggttttttcaaaagttaatatattgcgccaaaatacaaataaataaaaattaaaaaataaactttcaactatgtcgaaaaatcaaatcatttcttaattcactattttacaataacgtgtttactagataaaataattttcttttatatgtataaaaatcaaaaaaaaggtatgtcggcgctatacaccaacatacctttttatatcaatcgttcgaatattaaagtctattgtgaaagtaagattctgacaatcaaacatgactttaattacttttatttagtgtgcaattgcttcttgatgattatcatcttcaaaagaaacttgtacgttttcagttaaaacgtcagtgtatgtataagacacacgttcaaaattataaatatcttgatctagttccacaataaaaacagaagggtaagtttcttttaacacaccactacgttcaattgtttttttacgtccaccgttcgctttaagtacaattctgtttcctaattgacaatcaagtgaatttttgatgtctccaatagattttggcatattgctccacctcgctacaagttgtataataacacaaaatggaggtttttgtcaaataaaatatcaattttagcaatgtcggacgcgcttgtcaataatttaaaattctaattctgtgaaattttgcaattcattgtataaatttgcaaattcttttattgaaagtgtctctccacgtcttcgaggatcgatgccagccgcttctaaccattccaatattttttctttattcactttaccgtttacaaataagctttggtaattattattgattgttttacgtctttgactaaatgccgcttttgtcattttgaaaaatttattttcgtcgtcaatatcaacgataggtgttggacgtttcatcaattttacaacaatggaatctacattaggtggcggaagaaaaactgatttaggcaccgttaatactttacttgtttctgtataatattgtgcaacgattgagagtgagccataggcttttgtaccaacttgtgcattaagtcgttctccaacttctttttgcatcatgactacatagccatcaattggtaatttctgctgcattaaatttaataatattggcgtcgtaatataatacggtaagtttgcgacaaccataatcttttcacaatcagtcaggtgttctgttatataatgtgcgatatctgctttaagtatatcttcgttgatcacggttacattatcgtaaggtcccatcgtatcttttaatacaggtattaaacgttggtctatttcaaatgccataacctttttagcactttttgctaattgttctgtcaatgaccccataccaggacccacttctattatacctgtctgttcatcaatatcacttgcgtcaataatattatgaataatattcacatcaattaaaaagttttgaccgagactttttttaaaattaaagccatattgattaagtaaagctttcgtacgtgttggtgtggcaatatctttataatccatttacgattcacttccttcttcatcacttaaagcagacctaacatcttcttctgtatagccaaatgcattcaacttattgattaactgtttaccattagaatggcctatatgcagtttgcgacctaacttttctcttttatgacgtgcgtccttaccaacgattaatcctaaatcgattaaaacatctttacttattgattcatgaccttcttcaaaaggtgtactcacattcattaaagcttctttaatatcacttaattgtgcatgctctacgccaatttttccacgtttatttttagctttttctttatcaatatatgcatgtttcacaccgggaatctgtttttgtatcgtgttgcggattttatcacccgggaaatcagggtcagttaatacgataacacctcttgtttcataggcttgtgcaattacctttaacgttgattcgttaatggcgctaccatttgtttcaatcgtatcacattgaacagctctttttacgcgttcagtgtcatctctaccttcaactacaataaattcatttattttcatttattgcttcacctttcgttactttaattcattttagataaaaataaaaaaggtatcggttttaattgtgattaccacttagtatgccttatatcaactaagctctatctcagaccgatacctttttgaaatatgattatgcttttaatttaaacaatcgttctgcgttttcagttgtttgtttacacacttcttcgtaactcacaccacgtaattcagcaatttgttccgcaactaatgttacgcggacaggttcgtttcttttgcctctatagggatgtggcgataggaatggtgcatccgtttcaactaacagtctatcaaaaggcacatgctttgcaacttcttttggttgttttgcatttttaaatgtaacaggaccacctaatgatacgtaaaaattcaatttattgataacatcgtcagcaatttcaggtgacgcgctaaagctgtgcataatgccaccaatctcttcagcgtgttcttctttaagaatatttacacaatcttgtgtcgcttctctattatgaatgataattggtaaatttacgcgttttgctaatgcaatttgctttctaaacaatgcttgttgaacatctttgggcgacttatcccaatgatagtctaatccggtttcaccaatgccaatcactttagggtgtgctgcaagtttttcaatccattctaaacgctcttcagtacaatcaatcgcatctacagggtgccaaccaataatgccatagataaattcatattggtcaatgagctccatcgtacgttctactgtcggcgtatcaaaaccaacaacaaacatacgatccacgccattctctcttgcgcgttcaatgacttcctctaaatcttcatcatattgatctgcatttaaatgaacatgtgtatcgattagcatattaattccgctccctcaatttgtgattatttaattattgcaccatttggaattgcactaggcaagcttacaagtgtaagtacaccatctttttcagcagaaagtatcataccttctgattttctacccattaatttagctggttttaaattagtgacaactgctacctttttgccaataatatcttcaggttgatagaattttgcaatacctgaaacgatttgacgttgttcactatccaaatcaacttgaatttttaataacttatcagattttttcacttgctcggcgtcaataattgttgcagccttgatttctactttatcaaaatctttgatatcaatttgcgctttgctaggcaactcttcctcaacttcttcttcaatcttgtctggttgcattgattccttgatatagctaatttcaacctcgctatccaaacgtgggaagattggttcgggtttaccactcaccataatcggttcagttaatgcgccatactgttcaatactttctaattcaaaaagttctggtgcattaatatttaattggctgaagatttgttttggtgcatgtgtaaggaatggtcttaataataccgcaataatacgaatattttctactaagtgtgccattacgttaccaagcatttctttttgatcctcatctttagctaaaacccatggtgacgtttcatcgatatatttattagtacgactaatgaatttccatatagttgaaagtgctactgagaattgtaagtcatccatattttcatggaaagttttgacggtatctagtgccatttgttccatatctttatctaattcgtgtttaggaccttgatatgctggtagttcaccatcaaaatatttgttcaccattgaaattgttcgattaactaagttacccaagtcatttgctaagtcataatttgtacgttctacaaatccttctggtgtaaatacaccgtcagagccaaatggtaattcacgcattaagtagtaacgtgttgcgtccaaaccgtaacgattaatcaatacgttaggatctacaacattacctttagatttactcattttcccatctttcataagtatccaaccatgtgcgaaaacttttttaggtaatggaatgtctagtgccattaataaaatcggccatataatagagtggaatcgtacaatttccttagccataatatgaatgtctgcaggccaatatttcttgaatagactgtcatcatctgatagataacctaatgaagaaatataatttacaagcgcatctatccaaacataaacaacatgcttaggatttgattgaacacgaataccccaatcaaatgatgttcttgatactgccaaatcttcaagtcctggtttaatgaaattattaatcatttcatttttacgtgaaggcggttgaataaattcaggattttcatcataaaattctaataaacggtctgtatatttagataaattgaagaaataactttcctcttttactaattctacttcatgaccagaatcaggactcttacctccaacaatcactccgttttccataattggatcgactaattgtgtttcagtataatacgtttcatccggaacagaataccaaccttcatattcaccaagataaatatctccctgagccaataaacgttcaaatatttgttgtacaacttctttatgtctaatttctgttgtacgtataaaatcgtcgtttgaaatctctagttttccccataaatctttaataccagcaatcatttcatcaaggtactcgatttctgatttcccagctttttgtgctttttcttgaattttttgtccatgttcatccgttcccgttaaataacgaacatcatagccttgcattcttttataacgtgcgattacatcaccagctgttgtcgtataagcatgaccgatatgtaaattcccacttggataatatattggtgtagtgatataaaatgtttctttcgccatcaatgttcctcctcgtttcttacatcataaatatatctaaatttaatattgttttcaataaagtagacgtatgcttctgtactgtttttatatgcatttcatattaatgaattatatggatagtgtacgattcatatgcgttttttccacttttttattgatatgatttaataatggttaataatctctatcttatctacattaccataaatcacgcatgttatgggagtttttcaactcttttttattgtttatatatgattttatattaagtcactttcacgtctcttttgaagacttataaaatgattaattaacctcatgataaatgtcgtatacttcgctcgttttcatatgacgtgcttccgcaacaacttttatagctgctttaggtttcatattttgatttatatgatacgttacatgttctttaatagacatatcctcaaaccacgaagtatcctctgcatgttcatcaccttcaacaaggacaacgaactcacctttcaacggaatatttccatcttcaagttgctcaatcacttcgcttacatagcctgtgacaatttgttcaaacttcttagtaagttctcttccaactgatactttacgcgcttcatctatgtttagaattgtttttaaggtatctttcacacgatgcggtgattcataaataatcaacgtgctatcttcatacatacgctgttctaatatcgaatgtttttgcttttcttttctaggtaaaaatcctaaaaatgtataagtaaaagaaggcaacccacttgccatcagtgcagttaaacccgcattaggtccaggtactgtttctactctaatttgtttttctcttgcagctacaacaagttcatatcccgggtcactaataagtggtaagcctgcatctgatacgagtgcaatatccacaccttcttgtaattgttcaattaaataatctgtttgttgttctttgttgtgatcatgataggacttgagtggtgcttgtatctcataatgcgcacataatttttttgtcaccctcgtatcttcacaagctatcaaatctacattccgtaatatatctactgcacgataagtaatatctgctaagttaccgatgggcgttcctactaaatataacgttgacataagctatccctcacttattaatttaagttttttttgacgtgaaaatgtcttgatttcatattcacgtttcaatgcttcagatttggtatcaaacatttcttggtaaactaattgtacaggacgtcttatttttgtatatttggcaccttgaccattattatgtttgataattcttttttctatatcttttgcatatcctgtatatagactgccatctttacacttaacaatatatatataatgtttatccataatatatttctctcatttcttcggtataagtgccatctttgttatatatgtagaatggtggttgaatttctaagccctgattcccgccttttctaccttcaacaacaatcgtttgagccgctttatccagtttactgtatataaaataaatttttttaggttcaatttgataagttctcatatgacttaagacatccattagacgttccgccctatgaaccatgataaatcgaccaccttgctttaacaaatgccttgcagcataacaacaatctgctaatgtacacattatctcatgtctcgctatcttatgcgcatctatttgatgttggtgctgctgatttgttttaaaataaggaggattacaagtgactaaatcatattgagacggcttgaaatatctatgtgcttctttcaagtccatttgatacatatggattctctcttctagttggttatatgtaatacttcttctagccatgtctactaattgctcttgaatttcgacagcatctatcatttgttgccctttattcgataatactaaaggaattacgccgttaccagagcacaaatccattatattatcgcgctttttcacattggtaaagtgaccaagtaataacgcatccgtcgaaaaagaaaatacattatcattttgtataattctaaggttttcttttaataaatagtctaacctctcattctctaacaacatttccctttcctccctaaaaaaagaggacgagataacgatgcttaataatcaagcctatcgctacacctcatcctcaatcacatgtcatcattatacattaaccatttaaatcagttcgattattcacttaatacttcaagacaaaataaacaatcgtcaccttttctgtgtttaccgaataattctccattacaaatatgaaaaccttctttataaagcattgctaaattatctttgctacgtagcggttgtttctttggtagctttttcccattttcaaccgctttagatttttcttctttgtctattaaagtttttaaattttcattctctatttgtaaggcgacattttcttcaatcacttcaacggtaagtttttttaaatttcccatatcactgttgatttggtttatattggcttctagatttgctaatttttcaaatatgtcgctacgattcaatgttgtattagcctcctaatttaatgtttctaattcttccattttatattcaagtggctgctctaggccctcgactttaacttgcatagaaatatctaaaatattcaaacctatgacttttccattaccttcaggcgtttcaatagcgtctccgacatctggtaattgcgcgcgtgcttcttcataataatcattttcatatttaagacagcacattaggcgaccacaggctccagatattttagtggggttgagagatagattttgatcttttgccattttaatagaaactggttcaaaatcacctaaaaacgtagaacaacacagtgaacggccacatggccctataccacctagtaatttagcttcgtctctgacaccaatctgtcttaactcaatacgtgtttttaacttctgcgccaatactttaactaactttcgaaaatcgacacgttcatcagaagtgaaattgaagataacttttgatttatctagtgtgtattcacaatttaccaatctcatttctaactcgtgttgttgtatcgtctctttacataatgccattgcctcatccgcatcatactcatttttttcatattgtagcaaatcatcttctgtagcgagacgaacaatttcttttaatggcaatgtgacatcttgatccgcaacatctaatggtgcatatttcacgcgtcccatttctaatcctctttttgattctacgactacccagtcgccaacgtctaaatcaaaaccctttggtgaataatattccattttacctgatttttgaaaatctattccgactacattttgcattattaattcaccccttttattacaatttgttcaaatactaacatcgggttaacattttgattcaattttttatgtgcttctgttatttgatcatacatcaaaataatttgattgtatgttagttttttcgaaaatgctttgatatcttcctttaaatcatgatatatcatatcttgatccatacctactttagcatgcatgacatcttcaaagaaaccattaactgctgctaatgtcactaactgcaattttctatttttagcttgttttaataaatccacaatagctatcaaagccattgaacgattggttaacaataattggcaccatttaacaacactcttgcgtagagccattaaatcggtttcttcattaagcgtaacagcgacttcaatttgcgttgtatatgtacttaacaattcagctactggtttagtaatttctcgctcaactaatcgattaataaacttggttttatcaattggtttaaaataaacatgttggcatctagaatgtatcgtatctagaatttgttctggttttgtagttaataagatggctattgtgttttctggagggtcttctaaaaactttaaaatgctattttcgccttgaactgttagtttctcaaaagattcaataatgtacactttataatcgccttcgattggaagttgattcatgtgatgaactaattgttcaacttgatccttttttattgttgtttcttcagatgatacatacataaaatcaggatgattaaatgtttctacctttaactgacattgataatctccattacataaaataagtttcgtaaaatcaatagcgacttgctgcattgtttggccatcatcgccttcaaataagtaagcatgcgacaatttgtttgattgatacgctttcgtcagtctttcttgttcatccatcataaagttactcctttatataaaaaggctgctcatacatagttaccttacaaagcacatttcttaagaacatcttatatgtgtcctaaacaaaaatgtaatttgaaaggttaccatatatagcaaccataattctagaattgatggaaagcttcaacaggcattacaaataccgttgctcctccaacctctacttcaactgggtaaggtatataagaatctgcacttccacccattggtgttataggtgatacaagttgttctctattaccgcaagtgtcattaatcactttcaacatttcgtctacacggtcatcttcgacacctgataggaatgttgtattacccgctcttaaaaatccaccggttgttgcaagtttcgttgctctaaagttatgtttaacaagtttgtctgaaagctcttgactatcttgatcttgtacaattgctataatcattttcatactaaacacctcttcccagtattatatcataatttttctaagtatttgcttatagattcatatgttgcgttcacaacttcatctatgcttctatctgcctctatcacgataaagcgttcagactcattatgaataatttttttatatccttcaactactttttcgtgaaattttacatcttcttgatcaagacgattttgatttcgttgatttttcaaaatacgttcccgacctacagctacactcacatctaaataaattgtaatatcagggtataaaccatttattgcaaattcattaatagactttacttcttctattcctataccccgtgcatagccctgatatgctaaagaactatctatatatcgatcacacaatactaatttcccattttctaaagatggaatgactttacccacaagatgttctcgtcttgaagctgcaaataataatgcttctgtacgatcatccatgtcgtcaccctcaagtaatacctcacgaatttgctctcccgtctttacgccaccgggctctcttgtgagcacaacactgtattgattttctaatttttgtgctacttgttgtatcacagtagttttacctgaaccttccggcccttcaaaagttataaatgcagacatcttattcatccttaatttctattttattatctttcataccttcaactctaatttgatgattacaccaataattcattaattttatcatatttttagtgataatttctcctcttagcatgattggaatacccggaggataaggagttaaatgcgtcgccaatattttattatatgctttatctatatctatcttcttaaccttatctatttctctataatcatacgtaccttcttcattgtaaaagggtacatccgttacttcaaacgcaactcttgtttctatatttattgcgcttattcttgctaacaaatcatcaaatggaaattgatcccctttatgccataaaggtaggactagtaaaacttgatagtcatccgcaagctctacataaatctcttggttttcaaaaagtgtttgaagttcgattcctgtataaccattacactgaatattcaatttgagtggatcttctacatcaataatacgcatacctttatcttttaacactttaattaactgtgatcttttttcaaaaaacagactactatcatagcttttataaaagtcatgtgctaattctaaactactcatcaaaagataggatggacttgaagattgaaagtaagttaaatatttcaatatatcttcacgtaacggcgcctttttatgtataaaaataatagaactcatcgtgagtgatggcaacgttttatgataagactgcacaacataatccgcccccatattcaatgtagaatttggaaaacccattaaattgaaatgcgcaccatgagcttcatctattaatgtaggaatttgacatgctttcatatacttaatcgtagacgctacatcaaagcactcgccataataattaggataagtgaaaactgctaatttcgctttatctacctgagtttttagtgacacttcgtctggaccaacatactgttttgtcttactacttacgctcgtttttaataatttactagaagcacgcgctaaatccaaagcatgaaaaacagatttatgtacatttcttgcgatgatatactctccctttactttagcaaagctttgtatcactgctaatataccggatgtcgttccattgactaaaaagtaagcatcataatcaggatgcttgttgatatgttgcatactttgcccaataacatcttcagcttgatgcaaatcatccaatcctgtaatttctgtcatatccatttccattttcaactcatttaaatagcctatcgtcatatttttatggccaggtacatgcatggaaattggtttcttattcaataaatgattgagccgatctgttaatggtaatgtcattaaatcccctacttttcaaactgaaattctattttatatgtccctatattttaacatgtccctagcgacttctctatagtcattatattcaactaaatattcttacatacgagttttgactcgtatgttcatttaatcaacaccgcttgtaagctcgcttcgtcttttgttcagttcgtcagtttcaaacgctttctcataatagcttattttaggtttttcagttcttcgaactggagaagttaagcttttttgacacaaaaaaagagactcgcttgggtctctgattgcctgtaaaacgtcacttctcatttcaatgagttagtgacgtttacacatgtgctttagctcatgtgctcctctctgcctactcttgcggaacgtaagtcggctaccatcggcgctaaggagctttttctatcatgaggcaagcgctcgcatcttttctcactttcacgctttcctataaagaataactttccaatttattggatttagttattcttacatacgagttttgactcgtatgttcatttaatcaacaccgcttgtaagcttgcttcgtcttttgttcagttcgtcagtttcaaacgctttctcataatagcttattttaggtttttcagttcttcgaactagaagttaagcttttttgacacaaaaaaagagacccgcttgggtctctgattgcctggcaacgtcctactcttgcggaacgtaagtccgactaccatcggcgctaaggagcttaacttctgtgttcggcatgggaacaggtgtgacctccttgccattgtcaccagacaatgaaatgtatgaaattatacattcaaaactagatagtaagtaaaatatgattcaaccaaacaaaacatttaaaatttgattaagtcttcgatcgattagtattcgtcagctgcacatatcgctatgcttccacctcgaacctattaacctcatcatctttgagggatcttataaccgaagttgggaaatctcatcttgaggggggcttcatgcttagatgctttcagcacttatcccgtccatacatagctacccagcgatgccgttggcacgacaactggtacaccagaggtatgtccatcccggtcctctcgtactaaggacagctcctctcaaatttcctacgcccacgacggatagggaccgaactgtctcacgacgttctgaacccagctcgcgtaccgctttaatgggcgaacagcccaacccttgggaccgactacagccccaggatgcgatgagccgacatcgaggtgccaaacctccccgtcgatgtgaactcttgggggagataagcctgttatccccggggtagcttttatccgttgagcgatggcccttccatgcggaaccaccggatcactaagtccgtctttcgaccctgctcgacttgtaagtctcgcagtcaagcttccttatgcctttacactctatgaatgatttccaaccattctgaggaaacctttgagcgcctccgttactctttaggaggcgaccgccccagtcaaactgcccatctgacactgtctcccaccatgataaatggtgcgggttagaaatccaacacagcgagggtagtatcccaccaacgcctccacgtaagctagcgctcacgtatctcaggctcctacctatcctgtacaagctgtgccgaatttcaatatcagactacagtaaagctccacggggtctttccgtcctgtcgcgggtaacctgcatcttcacaggtactatgatttcaccgagtctctcgttgagacagtgcccaaatcgttacgcctttcgtgcgggtcggaacttacccgacaaggaatttcgctaccttaggaccgttatagttacggccgccgtttactggggcttcgattcgtagcttcgcagaagctaaccactcctcttaaccttccagcaccgggcaggcgtcagcccctatacatcaccttacggtttagcagagacctgtgtttttgataaacagtcgcttgggcctattcactgcggctctcctgggcgttaaccctaaagagcaccccttctcccgaagttacggggtcattttgccgagttccttaacgagagttcgctcgctcaccttagaattctcatcttgactacctgtgtcggtttgcggtacgggcaccacaattctagctagaggcttttcttggcagtgtgaaatcaacgactcgaggaaacaatttcctctccccatcacagctcaatcttaagagtgccggatttgcctaacactcaatctcactgcttggacgtacaatccaatcgtacgcttcgcctatcctactgcgtccccccatcgcttaaaacgaataatggtggtacaggaatatcaacctgttatccatcgcctacgcctatcggcctcagcttaggacccgactaacccagagcggacgagccttcctctggaaaccttagtcaatcggtggacgggattctcacccgtctttcgctactcacaccggcattctcacttctaagcgctccacatgtccttgcgatcatgcttcaacgcccttagaacgctctcctaccattgtccttacggacaatccacagcttcggtaatatgtttagccccggtacattttcggcgcagtgtcactcgactagtgagctattacgcactctttaaatgatggctgcttctaagccaacatcctagttgtctgggcaacgccacatccttttccacttaacatatattttgggaccttagctggtggtctgggctgtttccctttcgaacacggaccttatcacccgcgttctgactcccaagttaaattgattggcattcggagtttgtctgaattcggtaacccgataagggcccctcgtccaaacagtgctctacctccaataatcatcacttgaggctagccctaaagctatttcggagagaaccagctatctccaggttcgattggaatttctccgctacccacaactcatccgctcacttttcaacgtaagtcggttcggtcctccattcagtgttacctgaacttcaacctggtcatgggtagatcacctggtttcgggtctacgaccaaatactcaacgccctattcagactcgctttcgctacggctccacattcactgcttaaccttgcatcaaatcgtaactcgccggttcattctacaaaaggcacgccatcacccattaacgggctctgactacttgtaagcacacggtttcaagttctatttcactccccttccggggtacttttcacctttccctcacggtactggttcactatcggtcactagaaagtatttagccttgggagatggtcctcccagattccgacggaatttctcgtgttccgtcgtactcaggatccactcaagagtgaacaaactttcgactacaggattattaccttctttgattcatctttccagatgattcgtctagtctgttcttttgtaactccgtatagagtgtcctacaaccccaacaagcaagctcgttggtttgggctcttcccgtttcgctcgccgctactcagggaatcgatttttctttctcttcctgcgggtactaagatgtttcagttctccgcgtctgccttcagatatgctatgtattcacatatcgataacacgacataactcgtgctgggtttccccattcggaaatctctggatcaaagcttacttacagctccccaaagcatatcgtcgttagtaacgtccttcgtcggcttctagtgccaaggcatccaccgtgcgcccttaataacttaatcttttttgactttcaacacgaacaagtcggttgaaaacccaaaatgttattaatctgtgagtgttctttcgaacactagcgattatttctttttgaattcaaagcttgttaaaaaactctaattcactcggttttgcgtggtaaaatcataaattttacttacttatctagttttcaatgtacaaaatttttcatggtggagactagcgggatcgaaccgctgacctcctgcgtgcaaagcaggcgctctcccatctgagctaagcccccataaaaacttattaaaatcaatggtgggcctaagtggactcgaaccaccgacctcacgcttatcaggcgtgcgctctaaccagctgagctataggcccattcacgatgtgaatactccaatgagcattcaaaactgaatacaatatgtcaatgttattcctgcatcttcgtaagaagatgttccgaatatatccttagaaaggaggtgatccagccgcaccttccgatacggctaccttgttacgacttcaccccaatcatttgtcccaccttcgacggctagctccataaatggttactccaccggcttcgggtgttacaaactctcgtggtgtgacgggcggtgtgtacaagacccgggaacgtattcaccgtagcatgctgatctacgattactagcgattccagcttcatgtagtcgagttgcagactacaatccgaactgagaacaactttatgggatttgcatgacctcgcggtttagctgccctttgtattgtccattgtagcacgtgtgtagcccaaatcataaggggcatgatgatttgacgtcatccccaccttcctccggtttgtcaccggcagtcaacctagagtgcccaacttaatgatggcaactaagcttaagggttgcgctcgttgcgggacttaacccaacatctcacgacacgagctgacgacaaccatgcaccacctgtcactttgtcccccgaaggggaaggctctatctctagagttttcaaaggatgtcaagatttggtaaggttcttcgcgttgcttcgaattaaaccacatgctccaccgcttgtgcgggtccccgtcaattcctttgagtttcaaccttgcggtcgtactccccaggcggagtgcttaatgcgttagctgcagcactaaggggcggaaaccccctaacacttagcactcatcgtttacggcgtggactaccagggtatctaatcctgtttgatccccacgctttcgcacatcagcgtcagttacagaccagaaagtcgccttcgccactggtgttcctccatatctctgcgcatttcaccgctacacatggaattccactttcctcttctgcactcaagtttcccagtttccaatgaccctccacggttgagccgtgggctttcacatcagacttaagaaaccgcctacgcgcgctttacgcccaataattccggataacgcttgccacctacgtattaccgcggctgctggcacgtagttagccgtggctttctgattaggtaccgtcaagacgtgcacagttacttacacatttgttcttccctaataacagagttttacgagccgaaacccttcatcactcacgcggcgttgctccgtcaggctttcgcccattgcggaagattccctactgctgcctcccgtaggagtctggaccgtgtctcagttccagtgtggccgatcaccctctcaggtcggctacgtatcgtcgccttggtaagccgttaccttaccaactagctaatacggcgcgggtccatctataagtgatagcaaaaccatctttcactttagaaccatgcggttccaaatgttatccggtattagctccggtttcccgaagttatcccagtcttataggtaggttacccacgtgttactcacccgtccgccgctaacgtcaaaggagcaagctccttatctgttcgctcgacttgcatgtattaggcacgccgccagcgttcatcctgagccaggatcaaactctccataaatgaattatgatgtttgattagctcataaaatactaatttgtgttatctctaacacttgttttgaaccaacaatttaatgttgcgttcggaattaacgttgacatattgcaattcagttttcaatgttcatttcttcaatcacaagaaatgattttacttgttttgacttataaagtcaagaactttttcaaatttattttgttaaaacttccataaaaaaacgacccaaaggtcaaaatggaattgcctggcaacgtcctactcttgcggaacgtaagtccgactaccatcggcgctaaggagcttaacttctgtgttcggcatgggaaccaggtgtgacctccttgccattgtcaccagacaatga

SEQ ID NO: 27 - DNA, 38840 bp, Staphylococcus saprophyticus
cgtccctctatgagagatcaggactatttcacatggcgctcttattaccgacgcgtcaagatctcggtaatttcttatatcatgctacaagtacaggtgttcaagttggtggtggcgatcaccttgtcagtgaggcgctctattttgcagaccctgaaggtaatgggattgaaatttattatgatagacctaaagcaggttggatttggaatgacaataaagtgaagatggatacgctcgaagtcgatgcgaataacttagttgaacaaagaagtgaaaatggatggcaaggtatgccagatgatgcaaaaattggtcacctacacttaaaagctgctgatataggtcaatcccgtcattattatctcgacgaactcggcttagaccacgtttctgatttaccacaggctgtatttatgtcaactaatcattaccaccaccacattgcttttaatacttggcaatctaatatgttacgccaaaacaatagccaaagtttaggcttaacacatatagaaatatataaaccaaatgcacaagaaacacaatttattggaccagaaggtttcgaaattttagttcatagcaatacacatctcgttgctgataaagactaattgatgctaggaagatgttatgacattgattgcaaaagcagtgttcattcaagttaaatgcgcactgctttttattgttttcagaaacgatatcggcgtttctttttgacttatgataaacatctaccctatattaaatatataatcatttttattactaagttaataaataagggatgttatatttattatgaaaattactaaaatattgaataacaatgtggttatttcaaagattaacaatgaagaacgtatcgtcatgggaaaagggattgcctttggcaaacaaaatggtcaagagctagaaaaagacaaaattgataaagtttttagactcacaagcgaagaacaagaacgtatgctcacgttacttaatgaaatcgatcaaaatgtcttattaacgactcaagatattattatcaaagccaatcagctttatgaaaaacctatgtagaatctatttacctatcactaacggaccacatagattacgctattaaaagaaccagagaaggtcacattattaaaaatccattattatacgaaatcaacagactctatcctaaagaatatgatttatcaataaacgcagttgagaccattaaccgccgctttgatattcagttacctaaagatgaggctggatttattgctatgcatattgtcaacgcaagtatggatgaaaatatcgcaaatatatatgaaatcacaaagattaccaaaagtattttagatattgtgcgctatcactttaatttacacattaatgaagatgccctaagctactccagatttatgactcacctcaaatttttcagccaaaggttaattaaccatgagtcactaaacgaagtgactgatgaatcattgctacaagtattgcaacaaaaacatgtgaaatccgatgcatgtgtagataaaaaatccttacttagaagcatccgattggggctggcaaatcgattcaattggactcagagtcgtcttaaatgaattgtgggaccgttataataaaccgttattcattgttgaaaatgggttaggtgcaaaagacactattgaagatggccaaattcatgataattatcgcattgattatttacaaaaacatattgctgaagcaaaaagagccgttgaagatggcgttgatttaatgggttaccttgcatgggggcctattgatttagtatcaatgtcaacgagtgaaataactaaacgctatggcttcatttatgtagatcaagatgattacggtcaaggtactaaaaaacgtattaaaaaagattcttttgactggtataaagctttaattcaatcgaatgcacgtgatttataatataaaaagcttggtgcaactgcaccaagcttgtcttcatttattctaaccattctacgatatcatcttgtgtttggcgtactttatctttcggttccgtttctctataaccaaaagccaccataacagatggcgcaaaatgcgcttcgtctataatgccttcatcagttaaaaattgtgtgaccgcatctaaatcaaagccttctattggacatgaatcgatatttaataatgctgcacttgtcatcatgttacccagtgcaatataagtctgttttctcgcccaatctaataaagattggtcattgtcattaatgtgaaagttagtttgaaaatcatcaaatttcttttctgtagctggaatgctcgcttcactatatttttttacatttcttatcatatgttgtacgtaatctgattgtgaagttacatttttgcgtgctaaaattaatacaaaatgacttgctgtatcaagttgcccttgtgcaccccaactgattgctttaagtttatctctaatttcacgattttgaataactacaaatctccaaggctctaagcctaatgaactgggtgaaagtctccccgtttctaaaattgtattaaaatcactctctgaaatttttttgtttgcatcaaagcgttttgttgcatgtctaaaattaaaagcatctaaaatcgtttgttgcatttgagtcatcactttttgaaacctacctttcaaattaatcatttatatatgtagtatagctattttgaaattcgtattaaaacaatatgtttataacacaatcaaatcggtttgtttaatacttcggattcaatcacgcttaacacaccttgcttatcatttgagggtgccacatgttttgctgcttcaaacaacgaatgatcttcactattctccatcacataactatgctcggctaatagcaacatatctaaatcattatttgcatcaccaaatgccattaattctgacgcgtcgagttgccatgtgttcaataaacgttttaatgcgttcccttttgttacaccagggataatgatatcaatactatcatgtccactagatacaaattctaacttaccattaaaacgcgctttaagatcctcatcaagtgtaggatgcgtctcacgatttatgttaaatgctatcttcacatactcatcttcgggtaagtgttgtaaagaatgaatttcttctaattgacgataataaaaatgtgcatcttttttaaacgactcaggattttcctttaaaatataggcactacttaatccgcatacaattaagttattgatacctctttcaatatttaaataatctaccacttgctgataaaagtctctatcgaatgtttgataatcatataatttatccccttcataaataaccgcaccattttctgccacaaagtacatcgctcgttctccgaaaattgatttcaatttcgcatattggttaccactagcagctataaacttaatctgctgcgtttttaattgctgaaatatacgttcaaatcgttcttcatcgtatgttttttgcgtatttaaaaatgtaccatccatatcaactgcaattgcttttatcatagtgtcccctcaaatctttaaatttatatgtttatctattattatatcgacattgtagtttgattcaaagtaaatcccttacataatagctgaattcataaaaaaacagagtcaaacagcaatcccttttaataagatttcgcttgttccaccctgtaggtatgaacccatattataaatacctatactttaccgcttcaatttaatcatgttaaatataaccataaacgaaaaaatttgtcttagattatctttaattacttgtttaatgattgaataaagttcaaataatcttgcgtattctcttctaattgactaggcgcaatagtaaatgcactgtatagcttatgcgcaccaacatagtttgcagatacaaatcgtgtcgttgcaatcatcggactcactaattcatcaattgtaaatttcacattaccttctggtgtataggcttctgctattgacccaatagaaatcgccaatcctatattctttccttttaaggcgtctcctttagaaccatatgcccaaccatgtgtaaagacttcatctaagtactgtttcattaatggtggagaactataccaatataatggatattgaaaaataatatgatcatgcgcttctatcagtttttgttctttttcgatatcaattttgccatgtggatattctggatagatttcatgtactgcgacagactcacctatcttagaaagtgcatctctccaatgcttattcacagttgaattgctaatatctggatgtgcaataatgactaatgtagacatttggtcagtacctcacttttttaaatttaataagtatatattaatcgcatatgactcaaattgaaaattttttgcctaatttaactaaatctttttaaaattatttaatttttcatatttatttcaaaaaaaagttcatctactgtcacatcaaataacttcgcgagtttaaatgctaatgacaatgaagggtcatatttagcattttctatagcattgattgtttgcctaaaaacatttaattgcttaaaatcccttaagaaacaccaacttccattctgtctaagctgttaacaaaaatacattaatatttttgaaattaataaaaagcttaccagtgtgtactacactgataagctttacttatctatttcttcacatgtattttagaaacgtaatttgatttttctttaatatcaaaaatagttaagccaacaatatcttttttcttaccaggtattacaatactgattagataagagaagataaatgcaactaggaatgaaataatggatacaaagaatggcgaattgccaccgccaataccattgaagatataagcgaagataatacctaacgccaaaccgcatataacgcctagggtatttgttcgtttcgtaaagatacctacagcaaatacacccgccaatggcacacctacaaggcccgtaattaataggaataaatcccataagtcattagaatctgaagcaattaagtagatagacataccaaatccaaataaaccagaaagtataatcatccatctagcaaaagtaacttcgtctttctctttacctttaccgaaaaatctatgttagatatcgacagataaacaagctgaaattgaatttaagcttgatgaaattgtagattgtgcagctgcaaatattgttgcaataagtaatccggcaataaatggtggcatttctgtcagtatgaaataaggtacaatcgatgatgtattaaaaccttctggcaaagcactttcatgtgtgtagaaggaataaagcattgtccccataccataaaataatggggctgaaatcaatgccaaaacaccattcatccataatgattttttcgtttcagacatggattcagatgcttgataacgttgtacaacatcttgacttgcagtatattgatgcaaattattaaatatattccctaagaaaataataggaattgctgccgcggcagtattaaacttccaattatctgcactgattaattttttatgatctagcgcgtccgtcactacagttcccataccacctttgatatgtacaatacccaagataatgattgctgcagcaccacctaataggatgaccccttgaatgaagtcactccataccacaccttcaaaaccatcaaggaatgtataaagaatacacaatatccctactagactcgctacgacataaggatttaaatcagaaaccgcagtaatcgctagcgtcggtaaataaatcacaatagctacccttcctaaatggaacaatacaaatagcaacgacccaatcacacggacactcggcccaaatcgtgcttctaaatattcataagctgatgtcacctttaattttttaaagaatggtacataaaaataaattaacaatggaataatagctacaatagcgatattgccagctatgtaagaccaatctgttaaaaatgctttttctggtgtcgacataaatgtaatcgcacttaatgtcgttgcatagatagagaacccaactgcccacgaaggcaaacggccactagctgtaaagaaactatctgtgttttgacttgctcgttttgtaaaatacgcacccaccaataacattaatacgagataaactattacagctacccagttccacgtcccaaaacctacttgttgcatttacttcatccccttacgcgatgtcttataaattatagtctttaatcagtttgtctaatttacttctgtttgcttcgttaaatggtttaaatggacgtttaggtacgccgccgtcaataccacgtgatgctaaaatctcttttaacgtagaataaatccccatagataatacattttcgataatattattggtttcgtgttgaatttcataagcttccgcaatattgccattttgcgctttttcaaatatttgtcttgcacgcacaccattgacattataggttgaaccaattgcaccatctacgcctgatactgctgcttgaactaacatttcatcaaatcctgataagattaatttatctggaaaagctttacgaattctttctaataagaagaagtttggcgctgtatacttcacaccaatgattctttcatggttgaaaagttcaccaaattgttcaatcgaaatatttacacccgttaaatctggaattgcataaatagttaagttattttgtgtagcttcaataagttcaaaataatagtctttaatttcttcaaatgaaaatggataatagaatggtgtgactgcagatatcgcatcatacccaagttctgtagcatacttaccaagttcaatcgcttcatttaagtctaatgagtcaacttgcgcaatcattttcacatcgtcattgaccgcttcttttgcgactttgaagacttgtttcttttgttctttactgagcaagaaattctcacctaaactaccattaacatataagccatctaatttttctgtctcaatcgcatttttggcaatttgtgctaacccttcttctttcacttgtccattttcatcaaatggtactaataatgctgcatataatcctttaaatttatcttccatgaaataaacctccgtttgcttttatgagtatttttctgttaaaaaccctgtgttcctttatccaagttgaaaagtgtttgtttaatactatttacagttcaaactgtaaacgctaccataaagtgtatcaatagcatttcgaaaaaattcatcatttatactaaatttcaatgaaaatatttttcaaagttattatagctacacttttaaatttaaaaatgatacatatatatttgaatacattacaggaggcaatataaatgacggattataaagtcgcaattgatatcggaggcactgatatcaaagctgctgttttagataacggcttaaattttgtagattatcaaaaaatacccacaccgaataataccaatgaatacatcgttgacaaagtttatgacattgttaaacattttcaaatgacctataaactttcaccactgcatgtaggcatttccagcgcaggtgtaatagatgaaaccaatggcgtggttgattatactggccctaccattcctaattttaggggcacaaatttccccaaactgttagcatcactcaatgcggatgtcaaaatttacaatgatgttaatgcggctttattaggagaactttattttcatcaatatgatgtagataacattttttgtcttactttgggaactggtattggtggtgctttttataatcaaactttaggtttatacaatggcacacgtcatcgtgccaatgagattggctacctactatatcgctctgaagatcaattaacatttgaacaacgcgcttctactacagcacttaaatttttaatgaaatccaaatcattcccttatagcgatgatgtgccaatgctatttaaattggcggatcaagacaatgaactcgccttagatattctaaatgaatggagctttaatgttgcagaaggcctagcacaaatacaaatcatgtatgatcctggtttaattctgattggtggagggatttctgctcaagatcaaactttacttaaatatatcgttcctaaaattcagaatttccttccacctgaatatggtcatgccgaaattaaaacgacacacactaagaatcatgcttcactatttggtgcagtttcacaattttaataattaaaaaaaacgcactttatcaaaaccaaatatggtttgataaagtgcgcttttaagtaacaacatcctacatataaaatgctattcattcagcacagtctttttcgtatgttgatagacattatgcatataatcgtcatctaacagtaaataacttacaatatctattaaaaaaagtgtcgctatttgtgtattgataaatcttgaatcattgattcttgattgagccgtagtaattaataccaagtctgcacattccgtcaatgtactaccttcgtaatttgttatagcaaccacataggccccacgcgcgtgtgccacttcagctgctgcaattaactcagcagtttccccactatttgaaatggcaacaaatgtatcagaagttgttaataatgatccaaatattttcatttgatgcgcatctgtcgatacactaccttttaatcccatgcgcatcattctgtaataaaactctgtcgcagataaaccagaactacctaaacccgcataaataatttgtctacttctcatgatttgatttacaaaactttgaattttttcatcagatataaattcaccagtttgttggataatatcttgatgatatttatgaatacgctgaatcaacggactattttctatcactttatccgtcatttcttgctgtaaattaaattttaaatcttggaaattatcatagtctaatttattactaaagcgcgtaatcgttgctggcgatgttccaatcgcatgcgccaatgaattgattgttgaaaatgaatcatcaaaatgattactttgaatatattcaacaatttgtttgtctgtttttgtaaataaatgatgatagcgttgaatgcgattctcaaatttcatataatcccctgcttccaaattttgatttcattatattataaatgaaaatgtttttcataacaacgaaatgtattgattaatattttcttgtgttatattgaaaatacaaatctaatacaatataaatattcaattaaatctactaaagttatggagagtgcaattatgttaccacagggattaatcgtatcgtgccaagcattaccagatgaaccattacattcatcttttattatgtctaaaatggccttagcagcatatgaaggtggagccgttggtatcagagcgaattctaaagcagacattattgaaatcaaaaaagaagtcgacttaccagtaattggaatagtaaaacgtgattatgcgcattctgacgttttcatcacggctacaagtaaagagatcgatgaattaattgaaagtaactgcgaagtcatcgcattagatgcaaccaaacaaactcgtcctaaagaatcattatcagagcttgtatcctatataagaaataaagcaccaaacgttgaaattatggcggatatttctacacttgaagaagctaaaaatgcagatgaacttggtttcgactatgtcggcactatgttacgtgggtatacgtcatatacaaaaggtcatattttatatgaaaacaactatcattttttaaaagatgtcttggctcatgtaaatgctaaagtcattgctgagggtaatgtaattacacctgaaatgtttaaagatgtaacagatttaggtgttcattgtactgttgtaggtggcgcgataacaagaccgaaagaaatcacaaaacgttttatcaatgcttttgataaataatacaataaaaaagaccttatcttaagaatgatctgtatcgtgtcatcatttctatgataaggtcttttatttaaacttataccgcttcagctataaatattttacgatcttcccaagtatttgtttgttcattatagttgtcacaagtaattaacgttaattgttttttactagacttgtgttcatctaaaacttgcacatcttcaggtttgacatcaaatatttttgtgattttatagacattgttcttattgcctactttaaagcgcacttcactgccttttttcgcttcttttaaattagaaaattgataatcagacgatccgatattagtatgaccagcaatggcaatattctgatcatctagcgactcatccgcttctgcaaagctaacacctctatctaacagctcaggcgttgccggtcctggataaacaggagtctttatttctgcatctgggactgttaagtatcccaccatctcagatttatcttttggaatttcctgtttgttttcttttttatttgcagcatctttatcatacgtttctattttttcttcgctttctttttcatgtaaatactggtcaatatgcggtttagcgaataaataaatcgctgctaatatgaatagcacaccaattaaggtaatgagtcgattcccccattttttcatacacgtgtaactccttttccaaatcatcttttcttcaaatattataaataagtatagcacaacttataatgtatgatgtaccttaatctaactataccaaaagaagtataatgctactaaatgttaacttttataacatacatttgctaaattttgcactgaggtatttaatgattttattatttaatttgaaacatagtaaaaacaaaggatggtcatataatgataagacatgctactaaaagtgatttgccaaatattttagatatatataatgatgcaattttaaatacaactgcagtatactcgtataagccacagaccttagcatcacgtgaaatttggtttgaaaataaatctcaaaataatgaacctatttttgttttcgaagaacaaggtgaagctgttgcatttgctacttatgggtctttccgtgattggcctgcataccaatactcaattgaacattctatatacgtaaatgaacatcatagaggtaaaggcatcgcttcacaactactcaaacaacttataaatcatgctcaggttgaaggttataagacactcgttgcaggtattgatgctacaaacgacaatagtatttatttgcataaaaaattcgatttccaacactcaggtacgatacaaaatgttggttataagttcgataaatggttagatcttgcattttatcaacttgacttaagcaaataaaacacgtcattacgacatcaactcacttctcctatgcgttttaaaaatgcatgttagtggtatatattactgtatatatatcaattgaaagagtgtttacatgtcagtattatctaatgaagaacgcgtgaaaatattatcagatatcattgaaattcaatccgtaaatgaaaaagagttagatgttgcacattatttacaaaaactatttaaacaatatgatattaattccgaaatattagaattagaagatgaatcttcacgtgcaaacttggtggctgaaattggaagtggcaaacctgtggttggagtttcaggacatatggatgtcgttacaacaggtgatacagagcaatggaactatgatccatttaaattaacagaagatgatcagggtagattacacggccgtggttctgctgatatgaaatcagggttggcagcactcgctattagtttaatagaaattaaaaaagcaggtacattaaatcaaggtaccattcgctttatggccactgctggtgaagaagtaacgagtaatggagctgctttattgcatgaaaaaggttatatggatgacgttgaagcattattaattgctgagccttcacaagatggtattgtttatactcacaaaggtacgatggatatccaagtgatttcaaaaggtaaatccgcacatagttcaatgccagaacttggatttaatgctattaatccactcgttgattttattcactatttaaatgttgaatataataaagtagatgttcgtagtaaacttttaggtacacctacaatgaattcaacgattatcaatggtggcgatcaagtgaattccattcctgaatacgcagaatcattatttaatatgcgtaccattcctgcatatgataataaaaaattcgaaagcttattcaacagtataaaagaaaaagtagaaaaagaagataacgccgatattactgttaatccttatgttaatcgtgatccagtatatacgactggtgacaatgaattcttaaaatcagcaaaatctttaggcgatgaatatttcaacagagatttagatgttacgtcttctacagcaactactgatgcgtcttatttaatgaaagataaaggtgaagatttctcatttgttatgtatggtccaggtgaaacaggacaagcgcatcaagttgacgaatatgtatataaagatacgtacttaacattcattgatctttacacacaaatgcttccacaatatttgaatgactttaaataatctaatatattgtttttaatacaagatgtactaaaagagcttgggacacaaataagtggctcaagctctttttctatttggcaatgggtatagagtttatttcttcttcagtcaatattaaattcacttataacaactatcaacataaagtaatccaaaattttcactaaacttcacaatgttattttattatttattcatttctaaccatttaactaactcattaagattgctcacagtcatcgtaggagattggccattataatcgaattgtactttgtcacgatttatccaaacggtatcaaaaccaaagtttgcagcacctgtaatatcccatgaatttgaggaaacaaataaaatctcttctctagtcaaatgataataatttaatattaaagcatagctcgcaggacttggtttatactgtttaatttcgtccacactcatgacagtgtcaatatattcactgattttcgaattatcaactaaaggcattaacatgctatcattaccattcgatagcacacctatatctatatttttagcttttaaatccgaaaatactcttggtatttctttaaaatagtctagatctaaaaaagcatcaaacaattgattaatatcttctctattatattgtactttgtgttcatctaacgtatatcgcaaagcatctttagttaaatcatcaaaagtgatataacgttgcataatttgttttaaaaacatatgttgtaattgtgtttttctccataattgtgagatagaagatgcttgcgcttcatcaaattggtccatatgcttttcaagtgaagatatatcaaaaatagtgccatacacatcaaaaataatcgctttatacatcattaacctccccttcatccaaaaatcaaacttacttactatttatcaccaatttaatcaatcaaaaccgtttttactcaaattctatatatagcttactaaacctaattaattaaattttttaatgtcttcaatcattcgattcatataaacactttaattatagttaacatgctaaatattaagaatttttaaaattgcacctatgcagattatataatcttaaaacggttatagcatagtaaaaaggaggctggttgatatgaaaaaactttttctggtagatttattaaacttgttcttcatagcactgggttatttaataatcattgcaatcctactattttcattcgacttacttgaaatttaaacaaccggttctgtttttctaatggccctgagtcagattacttttgttaatatttttagtaattcagtattcaatggattattcactttatttttaatcatttcttctctaatcttcatatataaatcaatcgctttatatatataaagcaaataaacgtgcacttaatgataatgcgacgtcatcatgaatactttatagcagtaattagtatttatcgcaattaaaatcgttttatctttaaaatttttttgatttaatattgtaaagatacattataagttatataatattcatatagaatgtgtgtgtttatatcgaggcttgtgatgtgccgttaattatcatagttatattccattcccagaattaaactttatgcacccattttaatctatgatataaaactacattcttaaaatgtgcgcttaattgtgtgtgcattaaaaagagaactaaagtcacattcaggctgtgactttagttcttctatttataatcaatttattcaggtttaccattaggataaaccattacttttaatgatccactcttattcgttctcgcctgttccatcgcttcttttgcctcatttaaatcataagcatccgtgaacatcgtgtttaaatctgctgatgtggacgccaacatttctagacccatatcatacgtatttgcgtatctaaaaatacctacaatattgatttcatgatttgctataaaaggaatgtttaactcaatattttcttgttgaggtaaaccaacaatagctaatgtaccaccattgtttaaagcagctaaagcattttgtagagcaattgggttacccgctgtctcaaatgcataattaacacctttaccttttgtaatttcattaattcgtgtagccacaccttcttctttaatattaattgcatgtgttgcacctaattttaatgcttcgtctagacgtattttttcaagatcagatacaataatttttgtagcaccaaatgccttggctgccacaactgccatgagccctactggtcccattcccataataaccactgttgagcctggttgaacattggctcttttacaagcttgcacacctacagaaaatggttcattaagggttgcctcttcgtatgataatgcttctggtatatggaataaaaagccctcaggatggctgatatattgactaaatgcaccgtcaactggcggtgttgcaagaaattctacatccggacatagattgtattttcctgatttacaatactcgcattcaccacaaggcacaccaggttcaatcgctactctatccccgactttaaatcttgttacattactacctacatcggtcactacacctgaacactcatgtcctagaatgagaggtttttcaactacaaattcacctacacgtccgtgctcataataatgtacgtctgagccacatacccctacagccatcacttttaccaagacatctgttgcgcctatcttcggcactttaacttctttcatttccatatcaaatggcttatttaataatgagatattcattgtttctggtatatttttttccataattgtactcctcctatattatttaatagttaataattgttgcgttaatgtctgtgtttgttcataaatttgtctataaacgttataatactgttcatattttttatggttttccaggtttggataatacgttttatcatattcaataaaagcatctacacagtcttccatagatttaaaccaacccaatccataagctgccagcattgctgcacccatacctggtccctcctcatatttcaaaggtgtgacctctgcgttaaagacgtcagcttgaagctgtaaccaaaaattacttttagatcctccaccaatcgaaataacacgattactgttactgttcgcttgcatcatgtatcgatacgattcataaagcgagtatgtgatcccttcaattgttgctcgtgcaaaatcagccttaactgtattactacttaaaccaataaagctgcctcttatatatgcatcaccatgaggtgtacgttcaccttgtaaatatggggcaaatagtaaaccattggcaccaatttgagattcggcagcctgttgcacaatatcatcaaaggattcatcatcaaacattgtacgttttaaccaattcaagctatctcctgcactcaaagtcacccccattgtatatgtcatttgaggcaatgcatgattaaaataatgtatattgtttcctaatgatttttcattttcttgtgagcaagttaatacaacaccagacgttcctatactgcataaagcctgtgcttcatttataacccctgctcctaaggcgccacaagcgttatcagctccgccagcaaatacagcgacatcattatcaagccctaatgctgcttttacatcttctgttaaattaccaacaaaatcatgcgaattaattaacttaggatatatatcacctattgctaattgttcacctactcgtgtatcccattgctttgtatctgtattcaataataacgtacctgcagcatcactatattccattgaaatatcaccagtcattttgtatctaacataatctttaggtagtaaaaacacatctaatgcttgccaatgtgttggttcattctcttgtagccacaataatttaggtaaagtaaatccttctagtattggatttttcagcaatgtttctccaaactgatttttgattgattggcattgttgtgtcgttcttgtgtcattccataagattgcatttctaattggttcgccttggtgattcagtgctactaatccatgcatctgtccggagaacgatgcgccagatatttttttatttttcaactcatctaacttaagcagttctttaatgcttttcataaccgcttcaacccacgaatctggatcttgttcattataaccaggttcagtttgaattaatgtcaatggttcactcatttgaccaactacttgcccatctctattaactgcgattgttttaactgcacttgtacctaaatcgatacctagaacgacctcttccactaaaatcattcctttactaattagtttgtgtttgtttattcatttcagttactttacgatcatctatacccggttgatgtacttttataaagtaagtaatcactgcacccacgaaataacaaattgcaaatgcccatacgacaccaacttcattaaatattggtaagaacagtgttgcaatggctggtgcagcaaaattactcaaacctgcagctaaattatgtgatgataacgttgcaccaatatgttcaggttctaatgcagtaaaaattgcaaaaattggaacaaatgctgactgcgtaataccaaataacactgcacataaaatagcaatagcaaatatatctccactcaatattggtaaataatagaaaagtaacgttgtaatgccacatcctatacaaccaaataacatgacttggcgtttccatccaatcttatccgctacaataccccatacgacatctcctacaatacaagtaatatgcatcgttccccatgtccatagccattgttgcattgtaaaaccaatcgtatctgtaaataaaacagggaaaataacgactaatccaaatagagaaagctgattaataatcctaactacaaacactttaataatatctggatttttatagacaatccccacttctttaagtacttttacatatctttctttaataggcttatccacattaggtttaatatttctcttgccaacgacatagaatgcaattaatccacctaccccgatccagatgacagacatccaaagtgtgcccataaatcctatatgagggatagtaaagcttggtaaatatgtaccaatcacacccatacctactgagaacattgcccagaaccaacctatagcagttgccaaccgcgctttattcgtaatatatgttacccacactaaaaatccatataaaaataaaggataacctaatcctctaataccgtacatgagcaacatcatactgtaattttctaaaccaagcccaaaaactaaaaataatatgtgaaatactaaccaaataactgttcctagaaccatcacttttctcggaccatagacatctgataaaactgccgctaaccatgaaccgacgactaccatgacaccatatactgtgaatacaagtgatgcttgtccgcttgaaaaacctaaatcaacaatgttttttgataaaaatgcttgttcgatgccatcacctgtcatgaaaatgaatattgcaatgagcgctgcaaatatgattctcggtactcccatccaagtcttttctctcacgctattacttgaagtatccaaattaatttccccctttatgattaaccatcttttacttaaacgtttaagttaaattcaataaaaacccatatagtcatggattttttaagttttattaaatgaacacgattcacggataatcaattttgtcgatagtttgattgacgttacatccttacctttaatcaatttataaatcatttttgctgcaacctgacccatttctttaactggttgagatattactgtaagtttaggtgtataaatttcattccaataactatcatcaaaacccacgataataacatcttttttaatttctttttcactttcttttatggcttgtaacgcgcctaacagtaataaatgattcgtagcaacaattcctttaatccctttacttagcaaagtcttcgtagcttcgtaaccactatagatttgagcatttgtccctaattgttgatcactataatgaattaatgacggattaacatttaaatcaaactcggaaatagccttattatagccatttttcctgccgattgtagtgctaatattaggattcgcaagtagtaagcccacttctttacatgtactttctaaaacacgttttgttgcaatataagccgcttcttcattatcaacggttatagacggtaggcttgtagattcaagctctctgtccaacgtcattatcggtattttcaaccactcacgcttcatttgaaattttgatttcactggcacaagtataatagcgcttacattttgtgatacaaatgtttctattaaatcttgttgtttgtcttcattttcttctgaagatgcaacggcaacatgtagatgatgtttttgacactcgtggcttatctcagttaacacttctgtaaaaaaaggattttggtctgggataataaatgcaataatattggaacgtcctgtctttaatcccctagcaaattgattaggttcatagttcaatgtttctatggcatttagcaccttatctttggttttatcacttaattcagaacttttattgttcaacacgtttgatactgtggcaatggatacaccggccacacgagctacgtcatgcaaagtaggtttattatttttcatctctctcaccttaaacgtttaagttatactgtagacttttacaagtcaatatatacattataagaactaatctttgtttttgcaagcgctaccaaacaaattttgaatttcctcgcttcaagttttcttagacatctttttattaatccaacaccccaactttttaataccatctgtacaaaatctaaaatataaataaattcacccctcattaattatttcaaatagtctttatattaataaatttagatattcaacattttcaaacaatgaagttgtacaataataatattattatctaaatcaatcgttatttatctaggcaaaggtgatatttgtgattagttccttatcaattagaaatcattacacaactgaattaaaaagatgtataaacaaagttattatactactccccttaaataaaccttgtaaaatcaatttaaatggatcaacgattaccattgaagacgggatcatcattaacaacgctgatctatttcaaatgttcgatgtacaagatttagtagaactaagtttgcctttacaattattttttgaaaaagatacctgtctttcaacctcttactttgatttcaatcacatcaaacttgtagaacagtttagaaatttaatactagagaatttgcacttacccttacaagatgaaaacactgcaagtctttatatttcaaatatcattgactttttaattaaagaagctaaagtaaccttaaatacagtttatattccaccacttaataccaaacatccgctattgcagcaaataactgaatatatacataacaatatctatcataaaataagtacgaagaatgtatctaaagcattttatatttcacaatcatatatctcaatattattttccagtattctaaatatgaactttaagcattacactacttcattaagaattgctttatcattatttgatttaatacaaaatgatcaaagtatttatgatgtggctatcaaatatcaatttacaaatgtaagtacgtattcaaaacatttcaaacattacattcagatgccacccaaaaaatatatttataattttaggcaagaatactataacgagcccaaacaaattgatatagatcaagctaaaacgattcactattttgcacaaatccaaaagtcagctaaacgtgtagaccacattgcaaagacactcaacttatcaacattatcttttagcgatacttttaatgaacctcatacattcatacaattagaaagacttgatgacttagtacactttgatgctatgatttcagaacaaaatgatatccttgtatttccaaaagtaaatatatctatattagatacgcaaatcattcatttaaatgcctttaaattacaacaagtattaacatctatacaccaactcattgatagaaattatcacattacgcttaaaattacgtctaaatttttaacaaatcaatctagtacttttttgcgtaaattattgcttgaattaaaaaataacttaaatcatattacattacagttagatttaacttttaatgaagctaagtcgatgactgaatcgattaacaatatcaaacagtcttacccacaaataaaaattggtgtgataattgataagattattgaaaacagtgctaatatactacaaattcgtcgctttatgtcattgttagaaactgatttatattttattaacttagatttaatatctttagcagagttaatcacacaaaaaatttcacctatacaacaggaccttgatttaaaagcacgtatcgtattgtttattcacagtttaggttctaagcatgctaaaaaattgatattcaatcaccttacccatagtgcaataaaaagttgctatcactactctaaacaagaaacacatgtcgcaataactcaatttcttattgaatttaatcaacttattggaggatttggctatccttactattctgatgattatgatcgcatcatgttgttcaatcaatatcaaagtgctatgccagtggttcatatttacggtttgttatcaccttattataagcaaccaattacaacactgccttatgctatcgtcacaaaaaccaaaacacactatcatatattactttttaataatcttagcgaatcaacgatttcagttaatatcaatcatcatttcattaagtcatttccaatattttctagtttaatcaatagtgaatatggtctgattaacaatttaatacctcaaaatataaaccaaacctatatagataaatcactattaaaacaaataaacagaacgaattatccacgtttaaaattaacaatgcattattttaaagatcctttgattttcaagctaacaaaatctgctttacttaacattatgatttctatcaattaaatcaaaaaagaacctgagacatccatttatgcctcaggttcttttgcatgcgcgctagccctaatattctctttatatcctagtcgttcatatgcgctactttatccatgcactcaataactttatatttcaaaaaatgattgtaatttccctaaaattgcatcattcattgtatattgatctttaacgtgcccattttctaaatgtaagatttcatcggcacacgatagtaatagttcatagtcatgagtgatcactataatggtatgcccattagttgctaaatcgtcgatgattccactaatttctcgcatacgctgaccatctaaaccacttgatggttcatcaaaaataagtatatcacggcttgtttctactgcacttgcaatagccaaacgttgtttctctcctcctgataatgataaaggatgccgttcaatgtgctgagaaataccataatattgtaactgtttttgaattgtttcgtcatctaaatcagcatgacttaaacgtaattcttcaccaacactttctgcaaaaagttgattatttacatcttgaaacaccaaatagacattgtttaatctatgtccccgcttcaaagtaacttcatcattatcaactttccctttgaatttacgttccacacctgttaagcatcgtgcaaatgtagattttcccgaaccgttatgccctataactgctgtcactttacctttatttagttcaattttaggtatattaattgataaaggtaatctaggtttatatttaaaattaaaatctttcaacgttaacgtaccacatgcgacattgtgatgaactttaggtttcattttatctaaatgtgttgttctcaatcctaactctgccaatgtttcatgactcagtttattaaatgtatccttgtcatattgtttacgcattgtaccttgtgccaatatgataaagcgatcaacaacatccattaaataatgcaaacggtgttcagctataataatggttttaccttcttgcttccatatatttaacatttttcgcagtttgctgattgttttgaaatctaaatttgatgaaggttcatctaaaataatgatatcgtgaccactcacttgaatcgtcgtacatgctattaactgtttttctccaccagaaagattaaatatacctctatccaataaatgttcaatattaaattcataggcgctgttagcaatttgtgtattaatttcgtttggctccacaccaaaattctcaggctcaaaagcaagttcacttgttgtatttaagcagaaaaattgtgagcgtggattttgaaagactgagccacttacttgtgaaacctcataaatagattgtttagtaatgtctttaccattcacaatgatacgaccatctatctctccatgaaagaagtgtggtatcgtcccgttcaataatcgtgttatggtggttttaccgcaacctgatgcaccagttaaacaaataacctcaccatcattaatagtaaggtttatatcgtttaagattttttcgctattgtcataattaaatgatacattttcaaattgaatcatattttaacctcacactatatagtaagttatacataaaagcagtgtgccaactatgaataaccaatcaagccaacgtattttcaacgtcacaatagaacttcttttatgtgtcaaattcaatccacgagtaatggatgcgatagtcaattcattccctattttaatcacactatttaataaaggtacaatacgatactcgatatattgcattggttttttaaacgcaaaccgtaaagaaatccctcttattttcattgcatccttaatggatgctgattccattcttattgtgggtataaatctaaacataacagcaattgggatagttatttttctagataacttcatgcgttctaaacctaaaataagcacttctacttgtgttgtcataaatatatagtaacccatggctaaagaaggcaaaaatcttgtaataattccagaaggtacaaacacgagtaatgttgcaacttggctttgttcaatagacacaaatgcttcaccataccaagcagctacggttagcacaatacaggcaatgccaatcttatatttccctatcacaatcaataataagacgggaatcaccattataatcaatctgataaatatgccctgacccgttacgccacctgttagtgaaatgagtgaaataattagcatgagtccaatttttatccttggatcaaagttaaatatatgattttgacttaatacttgattatacattttatataatacctgcccgcttaaaatgctttttcaaaatgcctttagcaatgtatgcacctatccaagcaccaataattgtagtgataagaataatgggaatcataccaatagaaaacaatccttctactgtcgcttcataatctgtaccatatttgtcttgaataaaagctaaatatgaatttctcataaaataaaacggtagtaaattacctattggccaaaatgaaaaaataatataacctatactatttaatttccaacttttatattggcccatcgccataaccatatctgcaatcacaatcactggcacgcttaaaatcaaagccatccaaggatgccccatgattgctaataataaacttacgacaacaccacaaatcgttaatgcaccaaatttctgcgttttggtaataagtaacatcacaggtatgccacctactagccctatcattgcaggaagtaacaacataaagataggtataatacctaaaatacccggtggtgctataaaaatgaagtatactgccgtaaagagtcctatattaattaaatctttaacatctattttactttttgtcatcggtaactccctcttcacatgaatctaaaagacaatctatatataaattaattattattaaattaagatataaaaatcattcatttcaaacttactataattgaaaatcattatcaataacattcgattaaaaaaaatagtaagtcagctaatatttctttaactcacttactattatataccaactagtattttaaaactaaatggggcgtttcaattttgaagttctttttcagatctttatctttcactttttctccaacagacagatgataagtaagtgtgtcttttgtagtcacagacgttaaataaccatacgtaaacatatgaggtaagatgacagctgtcatcccttcagatagaatatagttaaattctaagctgcgtagttgtattgtctgtttatccttaatttcaacagctaacatttcatttaatttgttgctcgttatataaaatgataaattatcgaagtctttcgtaaaatatggtgtaaatcgataataccgattgttatattgggtaattgtgctcgtttccttactatacgggtacttaacacgtttattgccaatacgtttctcaatggtcatattatccacacgcatctctagatgtgcatcccagactttttcttttatgagataaggcatcaaatcatttaaatctgccttaaacttaaatctagtctgattattcatagttaaaggtatataaataaattcttttttattacgtgataataatttgagttgaatcattgaagcaacatggttgggattaataatagaactaataaattctaactccagttcaaaaccttgatcgttaaattcgaaatgtgacattctaatatcaggcttcactaattttttgaagacaaaatacggttcaccttcatcaaattgtatttttaacgttccttcttgagcactgtagctatgaaactttccatttttataactttcttctaccatttggtaatgcttcatgtcttttagacgagcgtaatgtaataacggtttgaatgaatcattcactaattcatctacagctgttggtactttttgaataaaatctcctaacgcatccatccacgcttcttttttatcatctgcaattttaagagaaaagttatttgttctagagaatgagaaatgtctatctataaaatatcctagcacttcatttttattttctaatgggctgtttaatatttcttcagtaattaatgacatcactttataaaaatcttcgggtgagacatacgcagaactcatatgttctccctcacgtttagttgcataatagtaaggcttatctgcaagtacagcaattcgtttcgcattgacatatgccttcattgtaaataattgatcttctgcacttcttaagtcctctggaaattcgattgcgtgatcacgtaataatgaggttctatagaacttagttgggctaagtgtataaataattctagaattggctaatgtgactgcatcactcgtttctttaaacatggatttcggtacaccacgaccattcacgccttccattttcaccaagaccacatctgcatgattttgatcaacaaatttcgacacatcttttaatgtatctttattaatgtaatcatctgaatctacgaaaaatacatattcaccttgcgctaattgtaaagccgtatttctaggtttacctggtccgcctgaatttgtatcaagttgttttattatcaaatttaatttatttttataagcttctaccacatttaaagtattatctgatgaacaatcatctaccaaaataacttcaaaatcttttttatcataactttgattttgtaaactgtttaaaagttctgctatatatttttctgaattgtaacttggtactataattgaaaatttcattatactccaccttgtaaaaatgagttaagtacaaatcaatatcagccgttcggcaatcacaattacaggatcccgttctatatctaacgctgaatatatatttttgtagttaactcattatgttttaattggtatttctattcacttaatttagctgccaaaaacgtttcttactaaacgttcacttgaacgtccatcttgatatttaaaatgtttatctaaaaatggctcaactttttcaacgtcaaaatctttttgatccaatgctacaattaaatcgttaaacgattcaacgattttaccaggtacaaatgtttcatatggttcataaaaatcacgtgatgtgatgtaatcttctaaatcaaatgcataaaataacattggtcgtttaaatacagcaaattcatatacaagtgatgaataatcactaattaagatatccgtaataaacaaaatatcattcacttctctaaaatcagatacatctacaaagtattcttgatattctctaggaatattcaatttatttttaacaaacggatgcatcttgaatagcacaattgcattattctcacggcaataacgtgcaaatcttgcaaaatcaattttgaaaaacggataatgcgctgtatgatgtccactacctctaaatgtcggtgcaaataatataacttgctttcctttaacaattggaagtgcttcttccatatctgcaacaatggctttttcatagtcttgatcaaataatatatccgttcttggtacgccagttggaataatattttgttcttttataccaaacgcctcaccataaaatggaatatccgtttctgatgatacaaatgctttggtgtaattcctatggtttactgagttaaaaaatggtccgccttttttaccagtacggctatagcctactgttttaaatgcgcctactgcatgccatacttgaataatttcctgactctttctaaatttcacagtataaagtaatggatggaaatcatctacaaatatgtagtctgctttacctaataaatacggaaatttaaatttatcgataaaattacgtcgtacagatatattagatttaaacaatgcatgtattttatattttttatctaaattttgacgtaacatttcattgtaaacatactcaaaattacctgacatttcggctctagaatcagaagtgaaaagtactgtattcccctttttcagatggaaaaatttagtaatcttgaaaatagactgaaagatgaagttacggacattaaatgaatatttattatattttagtttaaggtctgtaatccttttcttaactggattcattttaggcataggtgctttaaatataatattcaatacaaattcgttcacttcactcgaaatcataggctttacagtatattctgttttagatgaattacctccctttttaaaggtaaatgtaaagtggtctaataataaattatttttgccattgtgagtcatttcatcgctatactgttcgagtgctgtttcttctaattcataattattgggatctaacaatgtttcatttatattggcaatataatcaaaatcacctttataaacaattaagtactcacctgatggtagataattaccgtcatctaatatggcaacattaaaacgtgccttaaattgtttgccttctactttcacatcgtttgcttttagttctttggtttcagtcaaatttctcaatacaaagtttttcttattaagctttatatcttcaacatgaccttcaataaataattgaattctttcccaatatatattatcaattattattttagatttactcaattttaaaaaatcctctcttcattcaagttgataggtttttattactaattaaaaaaacgaaaatgccttacaaatttacattgtccatttgataaccgttttaccccatgaagtggataaatctgtttcaaatgcattgaccgcatcgttgattgttttgacatcaaactcattacctttaaggagcgctaatttttctacaacatctggattatttttataaaattcagcaatttctctaaagtcttgtgcgccacttctactactaccaaacatcgtcaaacctttttcaagtactaaacgtgtattgacttcaattggatattcactgacaccaagtaaactaatcgttccttcaggtgatactaagtcaataatctggttaactgcggattggctacctttgccacccacgcactcaaaagcatgatcaaacgtgacatttgcaggtacttcatcaatatgatagatgtgctccacaaacgaaaaatgacttaatttataatctgttttaccaaacacataaattttagcttgaggatacaatttacttaacaaaatagctgtaatataacctaaattcccatctccccatataccaaaactatttttattggaaattgatttacgttcaaatctttgtaatgcgtgccaacttacacttactaactctgaataagcaatcgtacttaaatcttcaatactgtcatctatttcaacgacgcgatcgtgatccataaatacgtaatcttgcataaatccatcgaagccactagatctaaatttactactaggtaaatagttttctgctataacatcatctttttcaactggtgtgttaggaaccataatgacccttgtaccaatttcatattcacctttactgtcatagacgacttcgccaacaccttcatgaattaatgacataggtaatttctttttcaaaactttttcatttctactacctgtataatatctttgatcagcagcacagatagacaaatacaacggtctgacaatcactttgttacttttaatatcttcattattataggttacttcaaattgtcttggcgcaacgagttgataaacttgattaatcactcaacatcccaccttttatgattgagtttgccactttaagatcataaggtgtcgttattttaatgttatataattctcccattaccaatttcacttgtttacctgctacaactaaaatcttacatgcatctgtcatgatttgtttatcttcatcagataaatcattgtagctatttctcaatagatttacattgaaagattgcggcgtttgtccttgatacatctcacttctcaccggtatcgattgaattgaatcaccatctgccgatgtgataatcgtatcagttgctgtaataacagtatctactgcaccatattttaggacactttcaatattttctttaattattctgcgtgttaaaaatggtcgtaccgcatcatgcgttataataacatcatcatcagaaataccattttctttttctgctgcactaataatattcataattgtttcattacgatcagaaccaccttgaacaacttcaattctgtcatctgtaatgtgatgcttacgtaatgtatcctttgtgtgagaaatccatttttgaggtgtcgcgataaatatcttatcgaattcacttgttaataaaaacttctcaaccgtatgtactaagataggttttccatctaaatctaaaaattgttttggtagtggtacgttgcccattcttgagccaatgccacccgctaatatacctgcataaatcatatacattcctccattaaagttctaactcatactgctgttcaacttcattactatttattttcatgtttaattaacgctatatatatttcctgaattttgttatagataaaaatattattttataagaacaatattaccaattatccctcactttttctacttattacatttttcacagtgtccaaccatttctcaaatcaatgctacttattagatacaatattttcaggattaatttcatccacagaatatttgtgtcaaattacacataatgagcgttattcaattttaatttttcagaatatatttacaattctaaattttcttagtatattcatacgtatcaacgattatttgggagatgtcataatgcatgcactgtggcgtatagtaatcatttctatttagaaatacactagcaattaatagagtgccaatcactattttcaatccaaatctgcatcaatcatgcgcactatcttattttcaatcattgggaggcacaaattatgaacaaatcagagcaacttataaatgaggacagtcaatacttcgcaaaaccaggacgcatcaaatattatcctttagcaatttctcatggatatggtgcgacacttgttgatgttgagggcaatacatatattgatttattatcaagtgcaagttcacagaatgttggacatgcacctgaacaagtcactgaagcaattaaggcacaagtagaccagttcattcactatacccctgcttacatgtatcatgaacccttagttaaattagcaaaaaaattatgtgaaatttcacccggccaatatgaaaaacgtgtcttatttggactatctggatcagatgccaatgatggtattatcaaattagcacgtgcttacaccggcagaccttatatcatcagctttgtaaatgcataccatggttcaacctatggttcactttcaatgtctgctattagcttaaatatgcgtaaatattatggtccaatgttgcctggtttttatcatattccttttccagacaattatcgtggaatgtttggcagcaaccagcccaataccgtttccgaatatctagcaccacttaaagaaatgtttgaaaaatatgtacctgcagaagaagtggcctgcatcatgattgaaacaatacaaggcgatggtggtttgctcgaaccagtagatggctatttcgaagccttacaagacttatgtaaagaacacggtatcttacttgctgttgacgatattcaacaaggattaggacgcacaggtagctggagttctgtctcacattacaatattgaacctgatttgattacattcggtaaatcattggcaggcggtttaccaatgtctgcaatcgtagggcgttcagaaatcatggattatttagaagcacctgcacatctctttaccacgggggctaatccagtgagttgtgaagcagcattagcaaccatcgccatgattgaagaccagaatttattacaagcaagtacagataaaggtaattatgtgcgcaaacgtattgatgcttggacagaacaattcaatactgtgggtaacgttagaggaaaaggattatccattggtattgatatcgtttctgataaaattaataaaacacgcgcatcagaagcagcattaaaaatttgtaaccgttgctttgataatggtgttgtcattattgcagtagcaggcaatgtactacgctttcaaccaccacttgtcattacctatgagcaactggacactgcgcttaacgttttggaagcagcgatatcagattttgaatcgggtaaactagataactacgacactgcaggtcagggttggtaataaatgagtaaactatgacaaccttcttgaatttaaataaacaacaaaagttagtttttaaaactacagtataattaaaaaaacaagagtctgggacataaatagatgtctcagactcttgttcatttgtgaagtagatgattgcgttgaatagggatgggactacgaaatcgcaattagaaaatttgatttctgtcacgcttccttgttttgaattatatattacgtttcatacccctttgtatgacgatatatggattatctattaccaacatcttgtcctatttctactgttttatcatttttattgtaaagtgcagcttggacactaccaaagtttggatcattgcgtttttcttcaatttcgaatcctaaacttttgaatatatctacatcttgtttactagttgcattttcatagaatatttttccaccatcgttgtaaaaacgcggtttatctatagactcttgtagcgtgccatcgcctcttaaataatctaccagtacttcattcagtgttgttggtattttattaccacccggtgttcctatacccatataataatcagggcctacaacaatacttggtgcagtaaatgatctcggttctttgtgtttaccaccatagttaggactggctggattcgatgagaagttacttaaagagttattcatatagaatccctctttcatgaatttaccagatccaaagaaactcgcgagtgtattggtagtacttgttaattttccatctttatctatgacaacaaaatgcgttgtgctcgtattatcaacattattcgtattaaagttactattaaagttaacctcgtttagtctaccgagtaaataatcttgtgataaatattcatcataatcttcatcttgtccattgataatatctctatttctatacatcaatgctctagattttaagatacctgttatgtaatctagacgattatctggtgctgcttggttatcagtagcttcatctatttccaatccttgaagcattaatgtaccaccaagtgggttagacgcagagtaaactttattattcaaataatctgtacctacaggttctttcttctctgttttataactttcaaaatctttctcattaatttcatcatctacttgtttagaaacacttttaccaattttatcatagaaataatctggtcctttgtctctaatccctttgatagtagaagctagagctggttgtttaacaacatcgccttctcttttcgtttgttttccatcaaaaaacggtgaatttctatcgatgtctgaaccgtataattttagacttcgctcgagttctgaatctacttcaaaaccatcttcagctaaaggaataacgtaattcaggattttcttttcatccattttccctgcttctttatgtgcatcatgtatgcctcgaacaaaaccaggtgtacctatttcatctttttgtttaaagttaaatgacgaaatatctttatattgccattgttttggtgcaacgttctcttgaccatcataagataacatggcaccgccaccacctaaaccggatgaatgcggttctgttatagctaaagcataagaaacacccatggatgcatctacggcgttaccaccatcttttaatattttttcaccaacgcgcgtagcaattggattatttgaagcgacaccgtaatttttatctgacttatcttggttatgatcagctattttattctcatataaatcatctttatcgtaattatctttttttgtaatcataaaaaagataaacgaaataatgattgttaggagtaatattacgatgagcgatttcttattgtaaatactcatacttaagctcctttagacaaatattggtgatgagaagtctccagttcatttttttcatattgatctaagccttcattcgctctagcaaatacaattaaaagaaaaataaccaatacgattgaaatgattgtaatacttatccaatgttgtttaatgttcataaacgtagcctccattctcttttttaagatctaagtttttactttctatattgttcaataactttctctcttctactacatttggtgatgacttcgttactttaccaccttgagatttaattggtgtaatcataaatttagattgtttaccattccaagtttgctgaactgctagaccttgtttattttttgataagaaatcttcggatgtcgtattgcctaagctgtaaaaaatatctgtatttttatatttttcaatttcttgaacaaccgaattatggccgataatcacatcagcaccagcttcagataatgaatgtgcatactctcgttgtctagtcgtcactgaacgttcatcggtaatcccccaatcaacattcacaacgacataatcgttattctcttttaattttttaattaatggcatataaatactgggttctaaactaactgatgttgtatttttcaatgtatccgtgtaattcgactcaacatctgtaaatgaaacattggcaatttttttaccctttatagtttgttgtacagtcttactatttatcggatttgaaccatttccagtaagataattatatccagtttgagcttctactgatttcataaaatcacgtgccgtaatattatcggtaacttgattgattacattcaaactttttaaattgagtccctttaagaacaatacattttccaagtttttggatatattcgttttcctgtcatctgagaacttcgtcatttctaaactcgcagtagaataatcacttccctttaagatctctttaatggatgcaaaagcatcattaagattgttctttctgatatgattatttaattcaatgtttcctagatatgtcatacttatctcatttggtgcttttcctattgcttttactggttctattttttgtgaagtcatggcaaatactaaaagtatcaatgctacaacgaagataataccggtgtatattgaattcctttttttatgccgcttcgtccactttagtatgcgttcttccattgaaaattttttagaattcttcataatccaagctccttactagttgataaagctgtaaaagaataagatgacatatgtaatacatgtgagtaacatacaagttgacaaagtaattatgacaccttgtttttgaatcgtattagctatgatgcccggtattacaacgccaatgcctgacatctctaccatttgaaatggacttaacggataaattaaatcaaaaacaaatttcaacaccataccggttagtatcatcgccgcaaattttctacgtccatataatataacgatacgactaataccatggttaacgatgaagtatgtaatacaactaataatcagtacggataataacatgatcggctgatcaaatattaatgctaaatatcctggtactactaaaccagcaggactgataccaaatttttcggcaaatattaaacttaatacgatgcctacaaataatgaaaaatataactctgaacctatcatattatttgatcccttctatatactctgctatttgtttacctggtccgtgaatattccctacacagaacatcaaggcattttgagattcattataaactgcgcgttcaacctcttttatgtctttaccttcaaagtttaaatatttcttctcgggcaatcctttcattacgtccgttaccatctgtgtactctttcctgtacatatcaatgtatcgaattcaacatccgtaataaagtcttcacagaactgtctcgttctatcaattctgtctgaacgacaatttaatataagaacaattttattgtaagggtaattatacgtttcaaccttgtttaaaattgcttttgtagactgcggttcattggcagcaaatgcatttacataaacatttgttgaattattcgcattatagtatttcacttccactgcgccgacatctggtggtgcatttaacatgccttgtaacgcaatatctctgtcgatgccaagtgcttcagccacacccattgcaattgcaacattatctggaaacacaatatacccaaatttccttaagaatgattcaggcacttcttctttattaacgacaattaatttagtcttacgtcttttggctactttagcaaaaaagtcggtgtaatcatccttcattacgataagatgacctttgtaaggaattgtcgctgtaaatgcttcagctacctcgtctaaagtaggtcctaagacatccatgtgatcttccatgacattaacgataacgccaatattagctttaaccaattctttttgaaaggttatctgataatcaggattcactgccatacactcatttacaagcgcgttcgccttttgtttaacaaccttctttataatgtcgcgttgttcaccaatattagcgccttgaggctttctataaactggatactctctcggtgtaaaccaatacatcatacgagcgtctgtacctgttgtcttgcctattacacgatattgatcttcgcgtaaaatactataaatcaatcttgtaattgttgatttacctctaataccatttatattgatgcgtataggaattttttctaatctatcagaatgctgtcttttctcaacaattcctaaccatagaatcaaacctacacaaataatgattagtagcaaattttgtccctcttttcacttcagactattaaattttatgtataaatgcttaaaggcaaagcacatgagtcaaccacactatacataagatgtatgagactatgtatattcttcaccattcaataaagccatcctaacacggagttattgatttaatataaacactttgaactaagtgttaattaaatgtaaattcgcatttacaatacatgtaaaaaagaatttttttcaatcaacaaatcctatcataacaatgttttaattttttaaaatcaaatattttttttattattttttaaaaatatttttactcatctcaaacgtttttcagaaaacaaaaatataatatttacttcaactttacatgatattaaaaatcaaatgttatcttgtatgtattaagacatatacgaataaatgattaggaggcagtttatgagtaagtcagttaaattagtagtttcaatttatcttgcagtagttgtaattatttgttgtagctatctaattatgattctagttggtagttttcaaggaaatgatatgagaggttctgtgctagatacggataacacaaaaaatattgaaaatgtagactatattaacaatacttcaaaatcattagaatcaaatgcatctccttcagatagtgttccaaaaatttcacaatctagtatcgatacaacttcaaataaactgtcttctatacaagacgttcaccatacatggtctttagataattcaatttctaaaaaccatgtatgatttttttatttctatatataacaatgattgaaagccctttttgatttaatacgtcattatatccaatattcaagttgaacattcaaatgcaaataccttccctttctgaatttatgcgatgccatctttaatatattcgatataattaaaatgactcacataaattgtttatttattgaaaaggggtttttaattatgagtaaatttacagaagctgaaaaagttcaaattctagaagatttagttgcgattaaatcagttaatgacaatgaaatggaagtttgtatgtatttaaaagacttactatcgcaacacaatattgatgctaagattgttaaaatcaatgacacgcgtgccaatctagttgctgaaattggtgaatcaggaccagtcttaggtatttcaggacatatggatgttgtctcagaaggcgatattaaaaaatggacatatgatccattcaaattaactgaagttgacggcaaattacacggtcgtggtgctgcagatatgaaatcaggtttagccgctttagtattgagccttattgatattcatgatcaaggtttattagaatatggtagaatccgtttactcgccactgcaggtgaagagattgttggcgaaggggctaaagctttccaagaacaaggttacatgacagatgtagaagcacttgtcattgctgaaccttcacaagaccgcatcatctatgcacataagggttcgatggatcgaaaagttattttccttaatccattgttgtatttcttcataattataactttctgtgccttgtactttataatcaaaatttaatttttctagattttccgcttcaaaatctaataattcttgtaaacctacgtataaaaattgattagtttttaatggtgcgttaaccaatttcgacatttcactatcgccttcaccaagtaaattagctacaaccatggcgtgttcatttgtaatgtctttaggatatgaaatatctggatgtgtatcaatccaaacaataccgagttcatcaccatatttttgatttaaataatcaaaaggtgcttgtgagaccatacaattgccgcctaaagtacctactttatctggttgttcttgatttaaaatatcttgtgcttgctttacattatttattatttgagactgcccgtatacaccattttctaattctaatgcgtcttcatctggttcttcgactttaatctcaaacgcttcttggttagaatcattaggaattaaccagtttaataagtgtgcccccatgataatagg

SEQ ID NO: 28 - DNA, 40926 bp, Staphylococcus saprophyticus
  misc_feature (10684)..(10684): n is a, c, g, or t
aaaaagacaaccattatatttaacatcaataaaatatatttaattttgtcctattatttaaacaaatactcattgataaactgtacgttaaatgactaaaaaaagcctcagtaacaatgaaagcattgttgctgaggccatattgtttcaccagtttattgtccttttaagtgaaaatatctcctgacatacttaaataatgatatgggttgggtggtagtaatcaaaatagacgcatttataaaggctaccctataaatgatagctcacgttacaatgttttctatttcaaatcatatgttctttaaactggtccttaaaaatgaggaattaaaagtaggtgaaatagataaaatttagagtctatgcattgggttttataaatgtatgcatttcacttaaaagtgactgaataccatagtataaagcgtattcaagtaggtactgtaatatataatcatttgaaagtggtgaaagaggaatacttgttattaaattacaacaagtttaagggttcacttcacgttaattttgacgtgattagactgtttgttttgtagtgtaattattttttacgctaaaacttagttacaaaataagtcatgtctcatcatatcatacccatcatattcactccccatctttttaaatacatcaaagcaagattgatgtgagtcattactaaataactcaaaaaatggcgccatttctataacaagtaaattcagattggaaacaaaacgttttgtatctataaagatttttattctaaatttaatagaattatttagtaataacttaattttattatattgtcgctcgtgtaatttgtaaagcgcttttttgtatttactaaaataacatttttctcgccttatcatatttgtaaaatgaaaacctcaaaaaatactgtaatctttttaattgattatagctattttataaaatattttgtacttaatgtctatactatttaacaccacaaagcaatttgtaatttgattgcatcagaatattttttggggttcaaacctgtttgtagtttacatttttctaaacgatatagcagtgtgttgcgatgaatataaagatacttagccgtttgtgcaatattcaagtcattttcaaataaactttttaatgtttcaatactttgattgtctaactcacctagtattctttttttatatctctcccttatttcttcatttatctgataaagtaatgttttttcttccacatcttcaaatgaagcgaaagatacattttcttcgtttaacataaacacaagttcacattcttcgtaagcatttttaaaatcatttaaacttgtaaacactaaactagaagcaatacgtacatctaaatttaaggatgtaaatacttgatgaatgcgatatattttttgattcagttcatcttgtagctcatctgttgctaaaataacaatatgattataattagtaaaagcgactgcgaaagtcgccttatccattattttagctaatctttgtacaatactacttcgtgaaaaaatttgtttctccaaattaataatgatgcattttctataagttagaaacgctacatttaattgtttttgtaaaaattggataaagaatgtgagggttccttttcaataattcctcgattagtaattcctgactacgtaactgtccttctaattcatatgtaaaataattttgataaagtaacaactctgtggacattttcaccaaatcagccacatgcactaatgctgatggatcacctgtaataccaatcacacctactacgttatcttgaaatataattggtaaattaatacccggctgtgtaccttgtaaataactcgtttcttcttcagacaaaatcactatatccccactcgctaatactttgcgcgcaccttcatgaacttgaccaattctacgcttatcaaacgaagcaatgatttctccattaaaattcattatattaatattactattcgttctttttactgtttcctcaacgattaatgcagctaattcatctgttaatacattcatcattttatcccctatcattttcatacaaattaataacatcatttttgtatattttaaccctattttcaataaaattaaatcgatataatagaataatacaacgatgaaatcgtttacaaggaggatggcgtatgacaattgttttagcaccggattcatttaaaggtagtatgtcagctactgaggttgctcgctatatgagtaagggtatttctgatatattccctgaagccgatatacataccttacccgttggggatggaggtgaaggcaccatggaagctttggtaaatgccacgaacggtacattcaccacactcaatgtgacaggaccacttggcgatactgtctctgcacaatatggtgtactccatgacaaggaaacctgtgtcatagaaatggctgaaacgtctggattaaagcatgtgccagacaatgcacttaatgtgatgcaagccactacatatggtactggagaattaattcttgatgcattggatagcggttatacgcaattcatccttgcaatcggcgggtctgcaacgaatgatgcaggtgctggtatgttacaggcacttggtgccaaacttttagatcagcatcatcatgaagttgatcttggtggtggtaatctacataagatacagcatattgacttaagtcattttgatgcacgtatcaaccaatgcaactttacgattgccactgacgtacagaatccattaattggtacaaacggtgcttcctacgtttttggtaaacaaaaaggtgcaacagaatcagatttaaaacaattagaacacaacctgacacattgggccgatttagtagcccataagaaaagcattcgtctgcatgacttacctggcgctggtgctgctggcggtttaggtggtgctttcaaagcttttttccctagtcattttgaagatggcattcaagtcgtcatagactatatcaaactggatcaatatttagaaaatgctgatctagttattacaggtgaaggtaagatcgatttccaaacattatacggtaagacacccatgggtattgccaaatatgcaaacagatacaatgtccccgttgtttttataggcggatcgattgatgtcgatatcgatcaatttaaagatatgggggtaattggtgcttttagtttaaccgatggaccgatgtcgctggaggaaacaataaaccaatcagaaaaattagttaaaaaaacaacccaaaacattgttagtctcttttttcatgagtcagcaattttatctaaattttctgaataatgttaaactacacttactagtcatgtgttatatcataatttgaagtataaggaggagatcattttgaaaacaagcatattatatggtaaatccaatgtcgaaatcgatttacctgatcacagtgtattgattgaacctactgatatcgatgcactcgatgacgatacaaatgcaattcgtaatgctttagcagatcctataggcactaaaccattaaatgaaatggtaagtgcaaaccaaaccgtcgccattgtcattagcgatattactagaccaacgcctaatcatatccttgtgccattgatcctagaaactttatcacacgtaccgcctgagaatttcgtcatcataaatggtacaggcacgcatcgtgatcaaacacaagaagaattgatacaaatgttaggtaaagatgtcgtcgatcaaattaaaattgttcataatcattgtaacgacaaggatactttaagtaaggtaggccatagtaaatatggatgtgatgtctatttaaataaagactatgttgaagccgattttaaaatcgtcactggatttatcgaaccgcatttctttgctggattctctggtggcccaaaaggcataatgcctggtattgcaggtattgaaacaatcatgacttttcacaacgctaaaatgattggcgatatacgctctacatggggcaatatgacggataatcccgtccaggatatgactagagaaatcaacgctatgtgtaaacctgactttatgctcaatgtcactttaaataaagaaaaagaaattaccgcagtctttgctggagaattatatgaagcacacgataaaggatgcgcttatgctaaggctcatgccatgtttaaatgtgataatcgttttgacgtagtgattgcttcaaattctggttatccgctagaccagaacttatatcaaaccgttaaaggcatgagtgctgcgcacaaagtagttaaagaaggtggcagtatcatcatgttatcagaatgtagcgatggttatcccaatcacggtaactacgctaaaatactgaaaatggcagactccccgcaaggccttgtggacatgattagcaatccgaattttgcaatgctcgatcaatggcaagttcaaaaacaagcagtcattcaaacatttgctgatgtatatttatactctaaactgactgataaacaaacaacagatgctatgcttcatcctgtacatgagattaataacacattaaaagaactggaaacaaaatatggaactgacatgaccataggcgtcatgccgttaggaccactgacaattccatatgttgaatcataattgaggaggaatactatgttaactgaaatgattacaaaagaacaaaaattagaaacgattcttaaagatatgaacagtgttattgttgctttttctggtggtgtagatagtagtcttgtgctaaaaaaagcaatcgatgttttaggacatgatcatgtcaaagccgttattgttaaatctgaattaactagaaatgaagaatttgatcaagccattgctttagctcatcaactcaatgcccaagtaattgaaactgagatagaagctttaaaagatccacatatcgttgaaaatacccctgatagttggtattacagcaaacgtctattatattctaagctcgaagcattacgcgcacagctcaactttaactatgtagttgatgggatgattatggatgacatcaatgactttagaccaggattaaaagcaagaacagaatttaatgttagaagcattctccaagaggctgaattgtttaaatctgatgtgagagctatgagcaaatccaaccatctacctgtttggaacaaacctgcattatgcagtttcgcttctcgtattccttacggcgaaccattaagcatttcaaaaataaataaaatcaatgaagctgaaaaatttattttagctttgggcttaaaccatgttagggtccgctaccatcaaaatattgctagaattgaagtcaacgacgctgatatacctagtgtaatccataacaaagaccagataaccgtctaccttaaagaacttggattcgactacgttacgattgatcttgagggctaccgtacaggcagtatgaatgaagtgattgatacgcatcatacacattaacaaagtaaaggtggcagtcaaatggtagaaaaatacgacgcaatagaacaattactgaaagctgtacatgcaaatgaattatctgtcgacgatgcaaaagaccaattaaatcactacgacgagctaggctttgcaaaaatcgatcttcatagaacacaacgccaaggctttcctgaagtcatttttggtgaaggaaagacaaaagaacaattgcatgatatcgtgcatacacttattaaacatgactctattgttctgattacgagaattgaccaagaaaaagctgaccatattactgccaaatatgatcagcttgaataccatgaaacggcacgcattgtctcaacaccaatcaaacatatagctaagacaaatcattatgcctccatcatttgtgcaggtacttcagatttaccagttgccgaagaagctgctatcaccgctgaagtcatggggattcaagttcaacgtttttatgatgtaggtgtttcaggtattcatcgattatttgcacatattgaatctattcgacaaagtaaagtttcagtagttgttgctggaatggaaggcgccctttcaagcgttgttgctggattagttgatcatccggtttacgctgtacccacgagtatcggttatggagccaatctacaaggtgtaacaactttattatctatggttaattcatgtgcaccaggtacaagtgtgcttaatattgataatggttttggtggtggttacaatgctgctatgattattaatatgattcagagtcattaaaattggagtggtaaattatgacaaatggtctttatttagattgtcatgcgggtatcgcgggtgacatgttattatcctctttggtagatttaggtgcagatgtagattatgtgcatcaacacttattatcactacctttagatcaatttagtttaaactttgctaaaaaaaataaacaaggcatacaagcgatgggtctaacaattgactttgaagaagcacatcatcatagaaaagcgtcagacattttcaacatgattaacgagagcactttacccaacagagtcaaagaacgtagcatgctgatatttgatgttattgcacaagctgaagcaaaaattcatggcatgaaaatagaagatgtccattttcatgaagttggtgcgatggattccattatagatattataggtagttgtcttgcattagaagatttgggtattgatgaaataaaatcgtcacccgtacctactggaaatggcaagattaaaattgcacatggtatatatcccattccagcgccagcaaccgctgaaatacttaaggatatcccacttgcaacatttgatgttcaaagtgaactgacaacacccactggtgcggcatttattaaggctttagcaacacatatcggtcctttgtctgctgtatcaatgtcaaatattggttacggttgtggtacaaaagactttgagtttccaaatgttatacgtgctatacaatatacagcgacagaaacgaccccaaatcaagtacaagtattagaatgtcaaattgatgatatgacgccagaaacacttggttactttatagagcaagtgataaatgaaggcgcattagacgcattttacacacctattacgatgaagaaaagtcggcctgcgactcaattaacagtaataagtagcgtcacacaagcaaaggaattcgaagattttattcttaaacacactacatctctcggtgtgcgcagttacgctgttaatcgcaaaattttgcatcgtcaattccaaaccatccatacaacatatggcgccattttggtcaaactagcaatgaaagataataaaattataaaagcaaaacctgaatttgaagatgttaaaaatgcagcacttcactctggacagtctttcactaatgtatataatgacattcaaaatgaagtcagaaaacacattcaaatagattaaaatgaaaaagtgagaatcttcatctaatcaactaactagatgaaggttctcactcttttttatagcagtaatgactgctcatcatttgaagaaaatcatctttacacgcttcatgcgttctacttttgcgatggtcctactttgatgtttgcactatccaatgcttgttctaatacttcaataacttggatactatgttctaacttttgggcggctaaatcattatttttctgtttaatgatttgggcaatttttaaaaaatctttctctaccttgaggacctccaaatctttcttgacctctactaaaaccgaattcaaatccttcacgttttctctttgtattatgaaaatgtctgctaaacatataaatcacctttctttatttcgatatatcgaaatatgtcaacgatatatcgttattctttaaaatttatttatatctaacgtaaaataaagaacgacacaaacccaaattttaccttcggatttgtgtcgctcttatctttattaattatactgctaattatctaatatattttaatgactgtaatcttgcatcattgcaacgatattaaccattttgttttgcgaaagcttggccaattgcatttaatttatgtggcgcgtcatgaacacccatcttaacttcaatgaagtgcattgtgtctggttgcgcttctatttgaagtagtactttttgaaatgcttcactcgtattcacatcatgtacttgaacttcatcttttccaccaaatacggtaggtaataatttataatcccacatcttaatatcgttatacatagcattttcaccatggattttacgttctactgtgtaaccatcattattaatcacaaaaataataggtttaatcttctctctaatcattgttgatatttcctgaaccgtaagctgtagtgagccatctccaatcaacaataagtttctacgacttgtatctgccatttgtgtgcctaaagtagctggtaatgtgtaaccaatagaaccccaaagtggttgtccaataaatttattgttatgtttcaatgctaaatcatacgcaccaaagaatgatgtaccttgttcagctaatataacatcttcttctctaataaaatcttgcatcattttgaaatacgtttcttgtgttaacggctcatcagtcaaatcgtaatcatgtgctttcggttgtttaaattttgggaattccgcattattcacatagttaatggcattcaagccgtccaataaatctaccaatgatacttctgtatctttcgtttcattcattttaaaatgatgatgattaatcataactacatcgtcaatatcaaattgatatgaatagccagctgtagcagagtcagttaattttgcacctatatttaagatagcatcactttgatctacgtaatttctaatatcttcttcggctaacgatgcatcataaatccccatgtagtaaggagatgtttcattaaatgcgcctttacctaatgaaagttgtacaaccggaatttgagattgctttacaaactgtttaagcttctcatgtaatttaaaactattaatttcatgtccggtaataataactggtttgtctgcactttgtaatttatctttaaccattgtcatgtacttcgttacatcagtctgtggtcgttgttcaatttcaaatggcgttgctacatcaatttcactatttgccacatcaatgggtaaatgaatatgcacaggtcttttttcataaagtgctgcattgattactcttggaatttcactttgtgcattttctggtgtaatatacgcttgcgctgtagtaatggatgcatacatatttctatagtcatcaaaattcccttctcctagagagtgatgtacatatttcccagcgctttcaactgctcttgtaggtgcaccagttatttgaatcacaggcacacgctcagcgtatgaaccagctataccattaacggcacttaattctccaacaccaaatgtcgtaaccattgcggctatacctttcatgcgagcataaccatctgctgcataactcgcattcaactcattcgtattaccaatccattccatgtcgtctcggctaataatgtcatctaaaaatgttaaattaaagtctcctggaacaccaaacactttatctacaccaacatcactgatacagtccattaaatattgtccaactctttttttcattttcatttcccctttcaaaccatctcaattacactacaaatttaactcatttattataaaaggtcaataatgttgacttatatattgatagcgacttattgttttaaaaaagaaaacgatacagctcgttacgctatatcgttagttagacactcatatttatttgttaaaatcatcttttagatatttcacttcctgaaaaccagtacggtatgaagccaattcttccataattgcataccaatcattacctacttttttctgtatatcttgaaacatatcattttgttttttatttaactctctaactaatttcgtacctttatcagtagaatataacgctttgacacgcttatccgtagctgtttgcttttcaatgatgtaagcttcatcttttaatttttttaatgtggcatgactaccttgtttagatatttctaaacttttcaataaatctttaattgtaataccaggtactttctcaataaaaaataaaaaacgatgatgttgtctattcaacccatatttttcgattatttcatctgcagtgttaataaatgttttataggcaaaataaaacaacaaattctcataatcattgttattactattactttccattacacacaatcctctgtttcttattttaatacaattttactagctgaaatccatttgagcattatccatacatatattactcactattttctttattataacagttctaatgccacggattatctaattttcatatattaactgtcgagatgtctaattaataataaatgattacttatttttctaaaatgcttacacacttaaaagtgatttcttattgctaaatcgtcatcagtacccattcattttcaaatcattatggtctctctaaatgaatcatatcgtcagcatgatccgtaaaaataccatctacgccccaattagctaattgattcgcacgtagggatttgttaactgtccacacatntaatgtataacctgcattttttatcattttcacacgcgcttgagaaagtttggcatcttcaatattcacaatatttgatccacaaaaatctaataaagttctccaatctccttggaacgctgcagatttaaaaattaatgctcttggatattctggcaataacgcttcggctaatttaactaaatagacattaaaacttgaaatcaatacttctatattcgaatctagttcttttaattgttcagcgacttgtgtaaccatgctttcagataaggccgtaccattcgaaccacttacgccctttaattcaatatttagatttatttgcgtttcattcgccatcttgatgacatctttaaaagtcggcaatctttcagcttcaaatgctttgccaaaccaactgccagtcgaagcattttttatgtccatataatctaattgagttacttcacctgtcatatccgttgttcgatcaagaaaatcatcgtgtatgataactagctgttcatctttcgtaattgcaacatctaattcaatccattttaaaccaggtatgtcagcagcctttttatatgaagccagtgtattttctggcgctttactcggtaaacctctgtgaccatagattgtaaacatcgaaccatcctcttccgttatcgttttccataattatgataggaacatagccatatttcaaataatttatgtaagattcatgaaactattatttataatatgccttatttaaaaattaaaaacaccctcaaatatgtactaaattcctaaaattaggttttcataccaattttcaggtgcacatcattgagcgtgttttacttttatcattactaaaaactatttaaagtattgtcactattttcgttaaatactaacttattttctaattaaagctaagataccagcaactaaaattaaaattcctgacaatatgccaaaaaagctaataaacacgatatttaaaatgccaccaactaatagcaacactcctataagtactctttttttatttattatacaactaagcactagagttataatacatgttaaaataactgctatgcctaatcctgtaatactaccactttcagtagctccaaattctgcgccaataccatcaagcataatagcaaataatccacctaaaataccaaatatacttcctaaaattcctaaaatcatttctgctaccctgtttgtttgtctaaccgtttgattttgattcatatttatttacctctttcatttttagtttatgctgcgtcatcttctgatgtatcttcatccgttgtatcttcttcttcgattttcttcatttcttcttcgtattctttatctatagcttccatttcctcttcatactctttttcatcttgttccatttcttcttctaaagctttatcttcttcatccattttcttatcatataatgcgtcaacacgtgcttctaattgatcatattcgatttctaacacatcatcgtctacatgattcattttttcaccatcagttaatgcgttatattcatccactagtgcgttatacatttctgctgaatatcctgtttcttcactttcagtatcttctgagtcttcatctgttatttttggttcttcgctgtcttctgattcaacattagtgtctgtttccgcttcatcattcgactcattactattagctacagatgcttccttgatatctgtttttttaatttcccatttagcttttacattattgaattttggcgtagcatccatctctaaagtataattatcactatccggcacatcataagttatgtatccagaaccagtgttccctttatttaattgatgagaaaagcctgcattcgtatcgtcattaccaaaccattcttgataattttcattatttaccttcatgctaaagtcagatgaatccataagcacctgatcttcattattatttttaaatttcaaatacactttaataacttttccgttttctggtgcactatattcgtcataatcattaacatattcaattttagttaatttcacttgcacaccatctgcatcaacagcctgtccaattttaaactttttcattttgctagttgcttttgatttatctgaatctttatccgcgctttttgcttcatcattttcagtaccacaaccagctaatacaaacataaccattattacaaaaaataataatcttttcatattatcccaatcccccaattttattcttattatttatttaatgtgttttactccattttaaaattaattatacacatgctctataatcttataacatttttaattaaaatcaatagtttttaaaataaaatttttaccttttaaaatatttttgaattgcgtatataaaatgacttaaaataacaaaataaccgtacaaaatttatttgtacggttattttgtgtaattatttttggaatttttaatactaaacgaaaaagtatgtatctcattccttttcatcttgattgtgaagccacaccaacaaatacgcctcactattcgtaataatgagggaagcgatgtataaatgaatgcttatttttatcacgcgtattataacaccacagcaagtaagaaagaaaaatggaagttaactcaaatatagttaattatttaaatgattatgcctctatttttgtatctttgaaaaatattcaatcaaactttttttagttttatttattattggaaccttgttacttttatttttataacacaatcctatcgttcttttcgcatcatgattttttattggaatttgtttcaaattaggtaagcgcacatccctcaaatgtggcaatatagatacgcccagtccagaactgataaatgtcgctattgtaatgacttcgtcaccttcaaaactaatttccggtgtaaattgatatgcttttaatatttcatctacttgttgtcgtaataataaattaggctttaataatatgaatttttcattcaccaatgcttcaatagcaatttcactacaatggcttaacctatgctgttcatgtaatgtcacatataatttttctacaatgagcggttcaaaatgcgtattctgacttgtttcagaaatagtagtaataatcatatccacttccccgtcatctaacattgtaattaagcgtttcgcatcatgttgtatcaatttcaattggatatttggatatgctaaattaaatgactttaaaaattctaatatataggtcacgcccactgaatgtaaaaaacctatgactaatttcccattatatacattagtagcatcaagcacattacttttatagatatccatttcattgatgatattattcgtcgtttttaaaaatgcgataccgtacttattcagtttaatcgttcttccaaccctgttaaaaagtgggatgcctagttccgcttctaagttctttatcgccctactcaacgttgattgacttacgtttaacatttttgcacactctgacatattttcagtttgtgctaattgcttaaagtattcaaagtgatgccactccatctcaacaaccccttatgcatattgtgcattcattaaatgaaaataatgcattttttatattattaattacatgctaacataaatacatcagatcataagcggggttttaacattggacgatttaaaaaacaactatgtcaaaaaaggatcacaggcttatataaaaatcattgttgccctgttcatttcaggattcactatattttcaattctttatagtgtgcagccacttattccacattttacaaatgcttttaatgtaagcgaaaccgttgctagtttagcgctgtctgcagcaacaatcaccttagcgattgcaatgctgttcttcggtgcactatcagaagttttaggtcgcaaaccgattatgatattttctgttatatctgtgtcacttttagcattggtgcaaccttttattttagattttaatacttttctaatcgtgcgcttgatacaaggtatctgtttagcagggctcccttccatagcaatggcttatattggcgaagaaatttcttcacataatttacctgaagctatgggaatttatattagcggtaatgctttgggtggtgcttttgggaggatattcactggttttatttctagtatttatggttatcaaacaggtctaatttcaataggtattattagtgtgattgctgcaattctttttacatttctattacctgcatctaaccatttcgaaaaacaacgcttttctgtcaaagcattattagtgagttacagtaaacatttgaagaatattagattattaaaaccatttatgataggttttttgcttttaggttgtaacattgcagcctttaactatatcggttttgtattagcggatgaaccctatcatttacatgatagtgtgattagctttgtttatttattatttttaatcggtatgatttcatctatacttaatgcaaaattaagagcacaacttgggactttaaatgctttgaaatttagtatattgctgctcattttcggtatttggatcacacttctaccgccattaccctttaaaatactaggtttagcatttagtgtttatgcgtttttcagtggtcatgcaattgcaagtgcagttgttacaagtcgtgccgaagatcataaagcacaggcatctagtttatatttacttttctattacatggggtcatctgtcggtggtactttagcagggattttttatggcgctattcaatggcctggtgttgtattgatgattacagcatttatgatcattgcctttatcatcgcgcttactataaaacaaaaataagagaatagaacagaaatcaaattttctagtagagatttgttagttacatccctgcaatgttggctgggataaagggttaccctaatctaaaggtcatatataagaacgacgcgtttctctaaaaatagaaaatagtctctttaaataagtgagactttatattttcaattctgtcacctactacctaattgcaaacagagtccgagacaactatctatgcctcagaccctcattactataataaaaagctaactcagaatccttatgatttcagagctagcttttatttttgatattttatttgacttgttccgtttgtgcttcaaattcatcaagtaatttccgagcatcatctgtcgtattcgtactcatcaattgatgtcttaattcacttgcacctcggatgcctcgcacatatattttaaagaacctccgtaatggcttaaactgacgtggttcattttcagtatattgatcgaacaaatcaagatgtaatctcaatagtccaagtaactcttcactcgtatgttctcttggctctttttcaaaggcatatggattatgaaaaatcccacggccaatcattacgccatcaatgccatatttttctgcaagttcaagtcctgtctttctatctggaatatctccgttaattgttaacaacgtgtctggtgcaatttcatcacgaagctttttaatttcaccaatcaattcccagtgcgcatctaccttactcatttctctacgtgtacgtagatgaatcgacaaatttgcaatatcctgttcaaatacatgtctcaaccagtctcgccattcatcaatttcagaataaccaagacgcgttttcacacttactggtataccgcctgctttagctgcttgaataatttctgcagctatttcaggacgttgaattaaacccgaaccttttccttttgtcgcaacatttggcacagggcaacccatattcaaatcgatacctttaaatcccatctctgccataccgatactcatttctctaaaatgatctggtttatctccccaaatgtgagcaacaataggctgttcatcttcggtaaatgttaaacgcccacgcacgctatggacaccttcaggatggcaataactttctgtattcgtaaactcagtaaaaaatacatctggtctgcccgcttcactaaccacatgacggaagaccacatcagtaacgtcttccatcggcgctaatacaaaaaatggacgcggtaattcacgccaaaaattttctttcatatataattaaaccttcttatctattattatctcgaatttttatccatgacgatattaccacaaaatgtcaacttacacaaaaagatgataaccaataaaaagactacacacatatatcttcagaagccttttatagatataaatcattcttgctttgatattatgacatgctatacaaaaacactttgcacaaaagttaatctgttactctatagctataaaaactacttaataagccgatacacagtataactgctgcaaatattaatgctgcattataattacctgactcgccaattaatacacctgaaaaagcaggtgcaatcatttgtcctaaactatatatgacagttaatgaagcgactaaattaattttactagcactttcaaacatcagcgtttgtgctttagacatgaataatgtcgtcaagccaaggaatgttgctccaaaaaatagcgaactaatcaccaaactcatcatacttcctgaaaatactggcaataccacagcaataatttgtaggataaacgccaaatatattgctttcgcatgtcctagcttgttagccatcatcgaccacaaaatcgttgacggaattgcacccaaacctacaaacatccaacttaaagctgcataatcggctaattcgggtatagatttaacgatggctactaagaaagtacccgttataatatatcctgcaccttcacaaaaatatgctattgaaaatccccaaataaattttttcttcaacttaaccgctacattatttgtgttatttgatgaattggaatcttcattttcagtgattggattttcacgcattccaaataatacaaaacttcccataattaatgaaaaaagactaagtacaatccaagtcatcttccacgtgtcagcactagtatagatgaaaataaatatactacttgtaaaaattcctaaacctacaccactgtacaataaacctgaaataccatctttcttagctactcttaacgcctcaagggctacatttgatgctaagacaaaaacagtaccacttgttatcccagaaatgaggcgtaatatggtccaaactgtaaaatcatccaataaccccatcattaaggttgaaatgatatttataaataaataaattttcaaatctgtaactttgttcactataactaaccacataggtatgatagcacctattaaataacctaaatagttgattgttgccaataaaccagcactttgattatccatatgacctgtttgttgcataaatggcattataggtgtatatgcaaaacgtccaattgccatcactataaataaacaaaccatccctaatatgagttgtcggtatgcgtgttgcactttcaccaccactttctaactataatgattccattatacgcctaagctttcactttacatatattaaattccaaaaatatatgaatcacttctacccccttttaattttcgaattgtaagtatacaatagatgctattaatatttagaattttctttatattcagattattttaggggtgattgatttggaacaacaaaacaacttatggaaagattggagattacatagcatcgttttggtcatagtcattatttccgaagtcatcggtgcacataaaatacctttgggcatgacatcaatcctcttattacccgtagtgtatgctgtactattaggtttagctgtttatttcacgccattgattaaacacaaacaagctaaaaattctgaacctatggtgttcatttctgtagctttacttatagcaaaatttggtgtagaagccggacctgctttacccaaaattattgctgctggtccagctttgatacttcaagaaattggtaatttaggaaccattgtattttctttacctttagcgattttacttggacttcgtcgtgaatctatcggtatgacccactctatagggagagagtctaatttagctttaatcactgaaaaattcggcattgcctctcctgaatggcgaggcgttatgtccatgtacatatttggtactattttcggcgctatctttttcagtatattttctggcatcatcatttcaattctacctttaagtcccattgcttatgctatggcaacaggtgtgggaagtggtgtaatgactgctgccgcacttggtcctctggtagaaatgtatccagatcagacaagcacaatcacagctttttctggtgtaagtaatttactcacgtccgtgactggtttatatgtcggcatgttgattgcactacctttaactagaaaatattatagtttaatcatgaacatcaaaaataaatttactaaggaacaggagtgattaggatgtcatcaaaagtgatgaattggatacttactttatgtgttgtcggtattatttctttattaagtaactggataggctatagcattatgccattaaacgctttaccaggcattctttcactcatggccatcgcattactaggattaattctccgtgacatcgtgccttttaatatccctagtattgcctacataggcattattggcttgttattaattatccagggtgtgccagttgcagcacatatagttgaatggactgaaaaagtagacttattatcactcgcaacacctgtcgttgcttatgcaggtgtttcaattggtaactcttgggcagatttcgcaaagttagggtggaaaacagttgttgtgggtattgtcatttttaataagtacatatattggttctgccttagttgcggaaatcgtattaagaatacaagggattgtataaaattttcgtagatatagtttggcaatgatgaatagatagttcaaaatagcctgagacataaatagatgtctcaggctattttccaattagattgatatgaatacttaaataactaacactaataccataaaattgatattttaattttcctataaatcatcaactgactattcaacaaagatgcctaagacaatgtcttatgtccctggtgccaaagcttttaaactatcaatagataaatcaatataatcaaattcaaaacaaataatacgatggctggtattgcttttttaatagggtctttcccaaggaatacaagtgaacctgcacctgccaacatagttaaagctaataaaatactcgcaaatatagccaatggtatataaaaaataccaacaagcattgctataccacctataagttcaaacagccctgtaattttattaaaaattggtggataacctaattttgcaaattcctgtttcatagcaccagataatattttcaagcctgtcattataaaaaagatacctaaaataatttccaatatgataataataatccccataacaaacacctcatttcattttatttacgagataccaatccagaaataatataaggtgtgacactttgaatatatgtctcagctggaacatcactaaatccatgacaccacttttcagaagctctataaatacttgcgcttaacatactcgctgaaagctgacgaatactatcatcttcaagtaaaattgaaattttatcattgatatttaatgttatatcttttggtaacttaatttcatatttaccatgactattcactctaccagtaattcgtttaccatttggaagattgataatcacttttgtatttggctctccttgacctgtgattattgtatctgtatctgtcaattcatctacaatcggtgcattaggctcagtcttatcgattactatcacgcttgttttattagatatattacctgctttatctgtaatattgataataagaatttcattacctaataacttaatttcacttagtatgcctatagaaaaatcaccttgttcatctgcttttccagtaataatttgtttattagggaattgaattgtcacgcttgcatgaggctctgttttacctataatttgaatatcgttatttgtgacattatcaacttttggtgcttctggcaccgtttcatcagcgacatctttcgttgtttttggtgattcgttgcctgttttatctgttgccttggcgctaacttctcctccgttgtttagtgaacctgacggaatatcgacgatatagtcgccttgttcatcagcaattactgttactttttgaccatctaggaacgtcacttctactgttgaatttggttcagactctccagttatttgagtgtcgttacttgtgaaatctttcattattggtgccatcggcgctgtttcatccactatatttcttattgtttttggtgattcgttaccggctttgtctgttgctttggcactaacttccccaccattgtttagtgaacctgctggaatatcgacgatatagtggccttggtcatctgcagtcgttgtcactttttggccgtccgggaacgtaatttcaactgttgaatttggttcagattctcctgtaatttgggtatcattacttgtgaaatctttcattgttggcgctaatggcgacgtcacatcttcaactatgacagaattcgaaacattactattaatgccatttttttctgctattgctgttaaaatagttcctgcttttaatggtttttaaattaataatacttgtagtttgtccattatttaatatcgtctgaccaacaataacattattttcatctttaataatgattgttgagccctcaacaccattaatttcaatttccttactttgatcattcacaggatttatgctaggtttaagtatttcttttatatctataactttgaaagtgttaacttcatcattagtataatttggagattcgatagctattgtataggtccctggttttaatttcggaacttgcatactgaatgtaccatcctcatttaaagtatctatacttattaatgtgccgttttcatctagtattttcactttttgttgaggcgctaaaaaatctaaatttactttaccaattactgtagtatcttctgtagttatatcatcggctatagattttcctactaatggagaagtcccttaacgtaatacttcctcaccatcatttttaccgtcaccatccgtatcttgattaaagggatccgtgtgtgatttatgaaattcaaagttatctgtcaaaccgtctttatctaaatcttaaatataataagtagatgatccgaatgtatttttaatcatcccaccattcttatctgtcagatacccatagaatgcaaagtcttcttttacttttgtagtattgctaattaaattaccattttcgtcatattcagcatttcttgttaatatattatttggactttgattatatttgataaccaatctaatgcccactgtttccggtaatgcattattaaatacaattaaatcatttaaattactacttgtaattgaccctctaccatctttatctattgccaaatcagcgactttatttttagggtaataggttttatcgaaaccactcactccataaaagtcataactatgtaattcaattgaaccaatatatggaacaagtttcggatcaatttggtagtgatatctccattgtttatttaatcctgaatctattagagggccaccataattaaaagttccattttttaatatttgttggtctaccgtaataccaccaaattcaccaatatcggaatcaaattggatagcaccactacttgctttaaatgcactattcgcagtatcagagtttgatgagacaatactattaattaaagtttcagatggcgttaggaaataaccgctagtttcagaagttttaatctttttgttttcttgtgaatcttttacatatattaagtaatttaacttatcactatggtcttccattttttctaatatgttccgtacgatatcgtccaattctatttttccgttttcagctgtgtactgactcaatatttccgctccaccaaaaaggccaccactagctctaataaagttaacttgccaaatatttgttgccttacactctttatttgccagtcttactaattccactgatgaactacgaccggatgggtttacagttattttcttaacatggtttgcaataatggaatctaattttaaattaatcttataaacatctcctgaatttgctcctgttaaataactatgtatttggaaaggtattgttttactgtctaacacttccttcgtagttaatggttctggctgaaaaattaacgtttgaaatgtatagttgtcagaataatccaatgcttccaatgaactatcttctatcatttctcttacactttttgttactacagggtgatacaaatcatgtttagcaagtagctttcttaattttataatatctttatcagttaattttttataagctcttgatgttccaattatatttttattaggagtttcacttttatttactgtttttatattttcaaaatcagtcgttgctcgtttcacagttactttggttttaatgtgattattggtttgagattggttatttagattctctttcgttcttgtttgaatggcatcttcctgaatcgcatcattctccatttttttatcatttatagttccattaaaatgaccaacatcttccgtttttatctctgtaaattttcgattattattttcatttggcttaagtttttcatcttgttgtttatcttgtttttcatcctttaaaactgcttcatcgaattttttgtcttctacattatttctaataatattattttcactaatttgtatttttgatatttcactattttttcaacgtgattattatctttatttaccacagagatatcgttctcattattatccttattttcattaataaggtattattgaaattgtaaaaaatcaaaacttattaggtaaacgttatttactatctggatatacctattctatggaagcattagcgcaaattttatcagaagttgcaaattcaaatatatcctatgacccagtgacacttgaaaaatttggaaaaatgtatgatgaacctaaaggattcggtcctttacttgcctccatgtataaagccggagaaatgggattacttgatcaaagtagcaacgattttgaaaaacttactggagaaaaaccagatacatttgaaacttatttgcataagcattataaaaattaaattcagctacaatctccccctacatactttaatactatgtagggggatttttctatattgactattagaccatgtgttcatttataaatctttacttcaggccacaaaaaatccccttgatgccacagcacaccaaggggtatatttttgactatttatgatttaattctaattcagcattacttgcttgacgtatttgtttcaataaagcatagtcctcaattaatgattgaccataagatggaatgatttcttttagtttaggctcccattgtttaagttgttctgggaagtttttctcaataacttctaaagcaactgacactgatgtagacgcaccaggagattcacctaataaagcaatcacagagtgatcttttgaattaactacttctgtaccaaattggataaagcctctgccgtgttccttagtatcttttataacctgaacacgtttacctgcttgcataatatcccaatcctcatctttagcatctggaacaaagcgacgtaattctttcatacggtcttcttttttagctaacacttcttggattgaatatttaattaatgggaagtttttcgctgcagctgataacatcgttataacattacttggattgatagatttgaataaatctaagtttgaaccatttttcaggaattttggtccaattgctgcgaatggtccaaatagtaatgaattttcatcttgaatataacgtctatctaagtgaggtacagtcattggtggtgtaccttcaggttctttaccataagctttaacttcgtgcttagctacaacttcaggattattacatactaagaattctcccgtgattgggaaaccgcctaaatgtttactttctggtatacctgttttttgtaataatggaatcgctgcaccgccagctccaataaataagtagtctgtaatatgatgttctacttttttcgttttaaggtctttaattttaacttcccatttaccatctttacgacgactaaaatcttgtacttcatgacgatagaaaagttctgcattgtcatgttcacttaaatttttagccatttttctagtcaattcaccgaagttaacatccgtaccttcatcaattttactagccgctacggtttcatttggatcgcgaccttccatcattagtggcatccacacttttaatttttcatgatcttctgtatattcgatacctttaaacattgataaaggagataatgcttcaaaacgtctttttaaaaagtttacgtttttatcaccttgaacaaagctaatatgaggtaatggtctaataaaggcttgcggattttgaatttgtttacttttcactaaatgagaccaaaattgttttgaaatctcgaattgttcattaatttctttcgctttttcaacatcaattgaaccatctttttgctctaccgtgtaatttaattcacatagtgcagcatgtccagtacctgcattatggcgttcattagaactttcaattgcaggtttgtcgagtctttcaaaaagtttaatattccaatctggtgcaagttcttttaataatgtcccaaatgtcgtacttaaaacaccagcaccaattaaaataacgtctttagaattcttttcactcatcatttttccacctttcgtatttacttttcaataagtcatttataataattaatagcgatgtatattcatatagtaactattttacgtataatttatctataccctatactacctattattatcataaaactattttccttgataagaatcttccatattaatgataaaacaaccatctataaatgtaaaatctatattgcaatactataaatcataacatttatatttattcaagattaaatagcgttattatccttcaataataatattgtcaattaagcgcgctttactaaatttgacagcgagtgaaataaaaatgctgtctttgatttgtgtttgctcgacaagttctggataactatatattgcaactgtttctatcgttccacttgtatgttctgttaagtagtcccgtgtcgctttgataattttttcgctattacgctctccatttttataaagcgattgtgctagacataaacttttatacaggtgaaccgcttctatacgttcatttttagtaagatagatattacgcgagcttttcgctaatccatcatcctctctaacaatatctacacctttgatttcaattggatgattgaagtcctctaccattttttctactattgccaactgctgtgcatcttttttaccaaaatatgctttatgcggacgtacaatattaaataatttattaacaaccgttaccacaccatcaaaatgtcctggacgttcagcaccttccaaaacggatgcaagtcggcctgcttttaattcaattgtcggtaattctggatacatttctttaacagttggatgaaagatataatccacgcctacagattcagcttttgcagtatcacctacaatatcacgtgggtaagaatctaaatcttcgttcggaccaaactgtaatggattgacaaatatactaataatcgtcacatcattttcattcaatgataatgacatcatctttaaatgcccgtcatgcaatgcccccatggtaggaataaacccaactgaacgacgctgattatgaaggtttgctataatacttctcatttcttctattgttgtaattaactgtgtcattctgtaacctcattcataatttgctttttataggtatgggcctcaccaggaaattgttccgctttcacctcattgttatattgctttaatgcatcaatgcccactgagaaatcaccaaattgtttaacaaatttcgctctatgttctacagcataatttaataaatcatgataaaccaatacttgtccgtctgtttcttttcctgccccaataccgataacaggaatatctagtttatctgaaatttctgcagctaaatcgcttgggactgcttcaagaactaacatcacagcgcccgcttgttgcacagcataggcatcttcaataagttgtcgtgcagcttctttattaccagcttgcattttatatcccataataccaacactttgtggtgttaatcccaaatgtgacacaactggaatacccatattgctacaattttttatatattgagttaaatgtgcaccttctgctttgattgcattggcatctgtttctttatatagttttaccgctatttctaaatcatattgatcattgacacctactgccccgaaaggtacatccacgatcaaatatgtattaggtgcacctcttctaactgcttttgtatgatggatcatatctgctacagtaacctgaactgtactatcataacctaataccgtcattcctaatgaatcaccaactaaaatgatgtctatatcagccgcttcgacttgcttcgcacttggataatcatatgctgtcaccattgaaattttttctttattcacttttaaatcttgtaactgatttaaagttttcatttaaaatcaactccacattttgatatatttacattgttatccatatattaaccaatctttttagaaaaggaaataaaataatatgaacaatgtcgcaattataggtcctggtgcagtaggaagtaccattgcatttgatttaagagacgcctcattaaatgtaaaattacttggtcgccgcaatgaaacgcttcactattattcaaataatgctcttgacactaagtatcaactagacgtgtgcgcacttaatgaataccatgaaaccgtagacttcttatttatcactgtcaaaattccccaactggataccgttttaacatcgtatcaacatttattacataaaaatacgataattatcctcgcacaaaatggacacggccaattacacaaatttgatcatccttatgtatatcaagctgtcgtatatattagtggccaaaaaacagggaataccatcacacattatcgtgatcacaaattaatattagaccaaaatgcacatacgcaagcattgcatcaatgtatatccaattcttctcttaatattgaacttaccactgatatcgataacgctatttggtacaagttactcgtaaacttagcaattaatagtgttacagccttaactcgttctactgcatcagtattagaagtaccagggataaaaaaactctgtgaacaattactcttagaaggcattaacatcgccaaagctgaacacgtacactttgaaccaaacattgtaaatacaatacttaatatttatgatggctaccctgctgaaatgggcacaagcatgtactatgatatagttgatggcagatccttagaaattgatggtattcaaggctatctattctataaagcaagaaaacatcatttaaatacacctattttagacacgatataccacctactccttgcgcaacaaaaataaataatagcacttttaatattcaactttaattaacatgagcgagacggaacaaaccatttgaaatgattgtcccgtctcgcttttgtttctttaataggtactcagtccttaatacaaagaactctgtaatgtatataagcaaaatgacatgatattagataaatatgacctttgttatgtcttttttctaaattgttcatattgtgttcataaattaactttatattgtaattattaacaaattggaggtacacatttatgaaaaaattaatgtacagttctgctttttatactttattaggtttactcagtgggctattttaccgcgaaatgtcaaaagcagaaaactttagcggatactcacaattgaacatcacacatacgcatttattagtattaggcaccatcatgttcttaatatttatgattatcgaatttcaattaaagttaacctcaaacagacaattatttaactatttcttttatattttccatttaggtgtattaattacggttacgatgcaatttataaatggcatcgcggctatgaaagattttaatgtaagtcctgctatcgctggcattgctgggttgggtcatattatgattacgcttgcttttatattattctttgttttattaaataaaagaatcaatgcgtatactggtaaaaacgtataataatatataataaaccctgctttcgctatgatgtgaaagcagggtttttaatgagcaaaaataagtaacaatcctaaaaatgcgataaataaatatagccatttatcaaaatgataatctaatgtgtggcgtttgcaatatttaccaattaacactgaaataagtaaaaacggacatgctaagaaaaataaagggtaatgtagcacttgtccaaatatcacctgtaccctgtccgataacaactaaaatggctgttattaaaaaatgaacttgtatggtgctgcttaatgtttttacagataagccagttaaagtactatatatcactactggcacaccatgtgaattataaagactgcctagcacaccagtaagcatagatgtaataatgagtgcaataaatgtatttaatttaaaccacatgatcagcattaacaaaataagtacacctatcatcacagcaattaatggccaaatttctcccaacataaattcccctactttctataactcatttgaattcattttataaacttctgttagcgtatcgacctcaccaatatttcctgggaaaataacatatggcattttgttatattttgcttcttctcccgttaaccaaaccggaaccccttgtgttatttgtccaatgacttgggcttttttgatacctaatcctttcgtcgctacatcacttgaagtaatgccaccttttgcaataatgaattgaggctttattgtcaacccttttacaatttctaccaatgcattggaaatatttgttgaaatacttaaattgttcgataggtcttccgttttaataacatctctagaagtgtagacaacgacatcttttctagaatggattaattcagatactttaactatttgatcatctatataactttgcaaataatctgacgtgactgctttaacatcaaattctacagcgttgatattagaatttactatgagatcattcaattgtgcacatgtctttttcacatgtgaacctacaataattaagccgccatgattttgatcgctatagttttttaaattaatgatttctccaggtgtttgacacatcacttttacaaaagatgctgctgttctaaacataaatcttttttcatttttatttagaaatgctatcagacaagttgcaaaataattcatgtcttcatcatttaatgcgtctacgaccactgcatcaaaatgagaaacttcatttagtaccttttcaattcctagtgtgtcacgctcacgaatttgagttaaactaatgcgttttacatcttttgcattaatttcgccgtcgcttttttcttagataaagcttgccattgtttcagaatcaaacccaaaagtcgtgtcatttgcaaattcactttctgaaactggtatgtagcgtccctcttctttaagataatgtatgccttgataggtataacggtttccttcaaaaaaggctggtaaataaaacactgcatcaaatgtttcattagaagcctcactcaacactttaggttcaagataaaagtgtcctcttaatgtcgaatcacctctacttataatgatatagggatggtctaattttcttgaaacacttgcgatatgatgactaatctcttgatgtaattcggttgtttctacttcatttaacgctcttgaattcgttaatatataaaacatattattttcttgcttaaatccatcttcgattaatgcctctgaccattccgtataaacaggtaggtctttaacagtctgtgtaccagtaggatcatcatctaacacaataattttataattaaagtcattaagattttttgaaatatgatcgtttacggtttcattaattaaactttcagttagtatattttttatacttattaagtttatttttgttctaaaaggaaatgattatagcaattatgatataaattgcttttggaggtctcttttatgaatattatcggacatcctcatatttcaatgtatacaaaaggtgcacaaatcaataaaaatttttacacacagacattaggcctacgcctagttgaaaaatctgtaaatcaagataatccaacgatgtaccatttattttatggagatgaaatcggtacaccaggcacattgcttagctttttcgaaattccaaatttaggtaaaaaccgtccaggtacgaacagtatacatcgcgtatcactactcgttcccgatgaatctgcattaacttactttgaacgtcgtttaaatgaacagcatatcacaacaacacaaatgacttatttaaatcatcatgcgctgttattcaaagatatggatggtttagaaatattattacttgcaaataaccatcgcaacacacctaacgcttggagaaaaaatccttatacagatattccagaagcatatcaaattttaggtatggggccagtggaactgcgcttacgcgacattcaaccaacacttcattttttaaaaaatgacttacgttattcgttaagagaaaatgtagatgaaactgtattgacattagattctgatgggctctatacggattttgtcttagttgaagaacaaggttcacgtgctcgacctggacaaggttatgtgcatcatattgcagtcaatacgccaaatgattcagatttgtacgctgtgttagatacaatcaatcataacccgggaaatcatagtggcatcattgatcgctactttttcaaatccctttactatcgccataatagcattatgtttgaatttgcaacggcagcacctggttttacagtagatacagcgattaaagatttaggtaaaaaactgaacctccccgattttatggaaaatcaaagaacagaaattgaagagaaattacatgatttataaagaaggctgaaaataacaatcttaaaaataaatgcattaggtgttttgatttagataacatatttcaaatatatttaatgcacttacgttacaccctatttaaattgttgttcaattttttcatctaaaacttgaatgattgcattccaaaatctgactatttaatcccacatctacctattactttcaaaaataaaaacggtgccaagaatcctaaatagaaataggttctcggcaccgcttctgtctatcatgaaatttaattcacgagaccattttattcatatttatgaagatgtatgattcaatttatttgttacaaatgcttggactggttcaaatattgtcatgtcttcttttaaaatcaaatcttctgttaattataattcggtaatttgatttgtgtcataccacttgaggtacattgtgcgagttgttaaattaaataccgtttgatataacgtataatgcatatcgccgttttcatctaagacagcgcctttaggtatactcacactatctaataatttaaaagcatccatcacatcgtattctggatcttcacttccaattaaataatttttcaaataagctgttttaatgaatcgttccggtgacgtataaccaccaggcaatccataagtaccaccttcattgcctaaagagcctaatgattggcccatgacatttttagcttcgggtttatgcggtgtgacagctgtataatttcttaaattctcataatgccaatttaaatctggattatttgtcaaaacaccgattggattctcgttaattacaattttcccatcctggaaagtaagttcaactgaacgacctgtatcatctgtaatatgataatgtaatggtgggacttcagcaatatcattaagcacgtgtgcgacaacatttacttgcttaccattttcaatcaagtcatcaatatttttattatagccaagcacccatgtaatcacttcattttgagcgatattcatatatccttcacgcacttctgtcgcatatgaagcatagcctctaaaatactgtatcgatacacctacaccgtgctcatttaacccatcaccaaataagaatccttccatgtcacttcctgcaccaatgaagccatattgtgttttacctttatattcgacacgcgattcccaatagaaatgacgtggttgtactgcaggttgaccctctaagtgataaacaaagtccattgttcgaccaagtatcgcctgcttactttttgataaaaatgaaaatcctgtacacatacattatctactcctttacattatgatgacttatattttgaggattcataaatgcctttgagcaaatcatgtatattataattaacttttgatatactcacacaccctgcgcttttgcaatgatgcttgaacatcgatcacgcgttgattcattgagcctttatacggtaaattaggtctatataaatgattaataaatggaccatctactaagacgtcaatgagctcaagcaatgtctttctttctgctgaatctcgctctaaatattcaaataaaaaaccagtccatacccataatgatttggtatttccaaaacgttttctaaaagtttgagcacacttcaaagtgatatctacattacaaaaaggttcgccaccaaggatactgagtcctgaaatataatttggcgcacagtattccataatttcttctaatgtgtcttcatgaaatggctcaccgtatttaaaattttgagccactttattataacaattttcacaggcaaatgggcaacctgaaacatataaactgcaacgcacaccttcaccatctacaaagctttgtgcttctattttagcgatatggccttgcccatgtcttatttttaaaatattcatactgatgcatctttcaaatgtttaacgcgcgcgcacatttctttatggcgaccttctatagtaggccgttgaacaggattgcctaaatagccacacgtacgtttaaccacatctaccgacttaggatcatcattgccacattgcggacactgatagccttttgcagttgttttaaaatctccgacaaatccacattttctgcaatggtcaattgggatatttgtgcctaaataacttactttatcgtaagcataatcccaaaccgcttctaatgcctttaaattatgatttaatttcgggtactcgcaataatggatataaccaccactcgcatattctggataatctttttcaaaatcaattttctcaaaaggcgtcacatcttttctaacatcataatggaatgaattttgataataacctttatctgtgatatcagctatttctccaaattgttcacgatctagtcgacaaaaacgatccgttaaggattcacttggtgtgctatagatactaaaccaaatatcgtattgctctgtccattttaactgatatgctttcatcgattttaatatatctaatgtaaatgcttttgctttagataaacgttcccaatgaggcccataaaataccgttgccgcttcatataacccaatatatcctatagacaaagttgcacgttgccctttaaataatgtcataatgtcatctgtttcttttaatctgtgtttaaatgccccgttttgatataaaatcggtgcattctctggcgtagcttgtgcaatacgttcaattcgataaaccagtgcatcgtgcattatggccatacgctgatgaaatattttccaaaaagcttccatgtccccttttgattccagagcaatccttggtacattcagtgttaccacacctagattacagcggccattattctcataatgaccatctttatctttccatgcaggtaagaatgatcggcaacccataggtgctttaaaatctcctaatagttccactgttttatcatagtttaatatatctggatacatgcgtttagttgaacattctaaagcgagctgtttaatgtcataattgggatctgactcatttaaattaacacctcttttaattgaaaaaactaatttaggaaaaattgcagtaatacggtctttacctaaccctttaattctagtagataatatcgcttcttgaatcttgcggctatatcgatcagttcctaatccaaagccgagtgtaacaaaaggtgtctgcccattcgaagtgtatagcgtattgatttcatactcgagactctcaatggcatccccaatgtcttgcgttactcgctcatctacatatgtatcaatgactgactcatgtacaaatttttctgcaatttgtcggtgtttcatttcattaaattttgcgtatttactcaacaattcatcaacgcgatctattgtacagccgccgtattgactactagacacattagcaataatttgtactaattgtgctgatgcagtctgtatagatttcggtgacgttacggtcgcattacctatttgaaagccatgtgacaacatactttctgcatcaattaaacaacaattcgtgagtggttggaatggatgatagtctaaatcatgaaaatgaatgtctcctgcttcatgggcttgagcgacatgcttaggtaataaataatccaaagcatacgacttagacactacacctgctgttaaatctctcatagtcgaaaatgtagcactatccttattagcattttcattaactacagttggatctttcgtaatgagatgctttaaatttttttcaagtttgttcatattaaccctcatttctatatatagtatatacattaattataaaacactatatattgtgtttcaaatctgaagatagacattaacaaattcgtcaaaagtttattaacacttcgtgaattttattttgaaattttcattagagcgaaaaatttattagtgctaaaataatatatgtatttaatttataaggagggattgtaatgtttgtagcagaagttgctttttcgactaacaaggaacatgaacaacaactatataataaagtaaagaaaacacaatccgagttgcataatgtggctggtttaaaatcatcagaagtgtggacaaaatctaaatcagatgatgttgaatatgttgttgtaagtaaatgggatgagaaaaaagattttcaaaattgggttgctagaccttctcatgttgaagagcataaagcaatgcataaaaaatctaaaaatggtgaagctgccaagccaccttttcaaaagacattacgtcaatatacagtagtagaattttaaatacttgaatcatataataaaatcaaaggtgaacataagtgacttaaaatcataatttaatcacttatattcaccttttttaatttcatgagcaagcacatcacgatatagctgctcctattaaaataatattttagacatgtatatcacgatgacaactgtaatggcacttaataaagtagataaaaagacaagttctgctgctaattcaggatgattgtcatattcttgtgcgataactgaactatttacagacgttggcattgctgatgcgatgaataatgtttgagctatgatgccctctatccccatgattttgataataacaagggcaatcaagggccctataatcaatcttataaaaacatacgcataggatttggaccacttcaaactaaatttgatattagatatttgagcacctagcattaataacgcaatcgcaatcatagcatcggcaacataattcgctggtgtccaaataaattcaggaataggtatatgattgtaatttaatataattgctagtaataatgcatataacacaggcattttaaaataacctaaaagtgcctttaactttcctatatgtaaagattgaatcgcaaatacaccataagaaaacgtgaatatgttctgcaaagataacacaataacttgaacagacattgctaatggatcgcctttgaaaaccaaatcatttactgggacaccgtagttacccgaattaaagaacatcagactgtttgtaagcgttgttgtctcccctttatccgttttacggaacatagacaataacttaccaataagaaatagtacaaacatatagattacgaagaaaatgataatgtaaaacaataaacttaacgcaaaatgcgtcttgtaaaatttcacaaaaataaatccaggcacaaagacatagatattaagtttggccaatgtatttaaatctaatgtaaatttcttttgcagtatgtatcctaaaaatatcatgataaaaataggtaaaagtacagtctgtagtatatataacatttcactcataagcatccccctttgttgcgctttagttatttatgattgaagttgcattttataactttactatttaacctatattactattaatcatatcagaatattaatcgtttgactttaaccattaatttaaaatcattttgtttcacgttaaacattttatgcatctcaataacatcatccttatgccatatcttaattttttatactgctataatttttcagttcacaagaaaaaagaccgaaacatctttatatgtctcggcctaattacccttaaaatcctactacgctataaaacgacttttccattcctacagactaatcatccttgttgcgtaggcactatgaaatctttctttggaaattcgatttttacttatatgtgttcttacgttatatacacaaaaagctgcataagcttttcactctgataacaattatttatctttctttttattacgatttctttttctttcttccaatatggacatagtaataaaaccaaccaccaaaacaggcaatagcatgcctaatgccatcatcatctttctcaccccattttaatatttaactacttttaatctcattttattaaaatatatcacaatttttctaagtttatatacataattgctttaaatattggtttgcaatctatgtattataaaatagactaggctacatttagtaacccagtctatttagatatacagactaacaaagtatcatttaatacttataaggatcttctttcaatttttttgatctttcatctagatcatctaagttatctaaatctgttttattatcatctttagattgtgagtaagcatcctttattgtctcttgctcattttctttttgctcttcagataaaataaatgagttattacgctcattcacttgagatccatctttaatatatggatttacatcgtcatcttcttctttgtcataaattggttctttcggctttctcactaataacataatacctgcaacaagccataaaaccgcatttatccaatttcctaagaatgaaatcacaccagcgataattaataaaacgcctgccacttttggctttttgctaattaaaaatactgctataagcgctatgattaatagtataatacctaagactaaaccagtagtcaaaagaccactaaaagtgctaaatatcgtatttccgtcttcatacgtgaaactactatcttcttgcatcatctgactaatgaatgcttctttgacctcgccgttacccatcataggtattagaacagccattagtacaacaccaagtatttgtaagacgataccaatccacgtcagtacacgttctattgttcttttcataacaatatacctcctgtgatttttaaaataaatttattaggacaataatctttacctacaatctttttaaaaatatttaattatacagtaattatactaattgttaatattgaagtccattttttacaaataataatgttcgctgaattacgtatgtcttatattttcataaaaaatgttaaataaaaagtgccaatatcctatagaatcgaattggcactttttatattataattcgcacatttgtaaatgccacaagtacatctattaactacttatgtgctttaaacgcattaacgatatgtgtaagttgctcaacgaaatgatgtacttcttcggcagtaaatttattacctagtcgatcttttactgcttcggtcatcactgcagtcgctctctgtaaaaatgtttcaccttcgtcacttaacataatcagtttaatacgtttattatctgaataagcgcgttgtacatagcccatttcttctaattttgcgatgcgtttagaagcagcagttttaaaaatattttgtaaacccgctaattcattaattgttactttgccttcattttttataattctcatcgcatcaatttgttctcttgaaagtaaattacttaaacctgtctctttaacaatttcaactatctctttatttaaatgcaacataactatctgaaatttagtaattgcttcttcaattgttttatctacgttttccaaataagtcacctccgtattgcacttatttaaattctattgaaaatggtaaacgttgtcttttgttaaaccatagtaatactaaatattgtaaaatcatcattatgacaataataccaacgagcaatgctactacaaatccaaagttaaagtgtcctgcatttgtaaagatggcttctctataaccctgtatcgcatatgacattggagagaatgggtgaatccatctaaagaattgtgctgataactctattgggaacataccttcactcgcacttaattgtaatatgagtaaaaccatagatatgaatagaccaattcgatctaataataaacttaagaatgtcgtaacagtaattgctgcaattgcccatagcaatccgactaagataaatttaccaatgttatctatagacatattaagtgcaaatatcgcccaactactcatcaataacgcagataccgcaccttgtacgagatacaataataacttaccgaatgcttgttttagtgatgtaacatctttagttaacatttttctcagtgggtatattgcactaaatgacacagcacctacaaataaactaacactcgccatataaggcacgattgtttcaccatatttatcggcttctgtagcattattttcatttacttccgttacattatttaacgctttttcattgtcaccttcaaaagcaacgccgtcttgttgctctacagattggtctatttgcgcttttaattgatcattattttgttgcaattgattaagtccatctgtgacttgttgattgcctgaaattaattgctgtgcaggttgtcctactgttggtgctaattgtttcaatccatccgttacttgctgattaccatcaattaattgtgattctgcatcagacatgtcacctaatgcatttgaagtatccttgaatccagattgtgattttttagcactagcaaataattgatctaaataattggtacgaatattatccttaattgaatttgttaccgtatcaattgctttttgtgctgattgactaccagtataactagaccctggattgacttgtgtttcaatatttatttttttaggatttttatctaataatgtcgtagcgttactagaggcatctttaggtataatgatagttcctacacttttacctttttctaattgattaaatgcctctttttttgaaacttcttgaaaatcaaatttatcgttatcttttaatttgtcgacaacatcatcacctattgtaaccttttcaccatttagctttgcactttgatcttggtttacaattgaaattttcaattgatctgtcttatcatatgggctccacatagaacctacgaataaagcaacatataatagcgggatagctgctattgcaataagtgctatgattaacattttatttctgaaaataaatttaaattcatt

SEQ ID NO: 29 - DNA, 709 bp, Staphylococcus saprophyticus
gacgcctatcatttatggatatgattcacaaatacaaaaaacaaaccagatggcaaatatagcatctggtttgtttttattatacattcaattatcaatccactttatatatgactttctgtttaactactatcttgttaagatttatggttttccataaagtggtagacatgtagcgttaaatagataacctctgcctcatacacttttattttcaattcttgttgtaaaagtcgcatgattttcaatgcaatattaaaacataatggatattgttctttgagtagtgcttcaaaagcattggttttctttaatgattcaccatttcgtaatcgtttaattaagaattgaatatgtcttataaaacgttgatattgaatagtatccttatctatcgtttgtttcaaatcattttctaaaataaaaacactcttattaatcagttcgttgattaaatccatctcacgcatggacaatgattcagtattcgaagcaatatgtaatgcaataaaaccaatttcatcttcaggaaagtgaacctccaatacgtgatttaaacgttcaattactttttcagctattttgtattctttgctatacaactgtttagtttctacaataaaaggattattaatcaactgattttgcttcaaccgctaataagcaaaaataatatgatcggttaatgaaatgactaatttttgggtat

SEQ ID NO: 30 - DNA, 39013 bp, Staphylococcus saprophyticus
tagtgattcataaaatgaccgccaaattcagttactttacatgtccctccaagcgtatccattaatctttttgtttctttgtaagacacataggaatcatttttggcacatagaccataaaatgcctctactttttgtttaacgttttcgtaatctatatgaaagtcttcaatttgattggtttcaacaaatggtatgacatcctccatgaatccagaaatactaaataatccttgtatagtattaatttgtgatttctctataaactttaaagctgcgagtgttccaaaaccatgcgttacaaaaaacgtttcatacttagtaacacaaatttgatttttcatgttactcatccaagtatcaatatgatcattttcatcaaccggcaagttaaataaagttacattataaccttctagcatgaggttactggctaaccattcataccaatgatttgatgcatcaccttgttttgaatgtactataattatatccgtcatataaatcccccattaaaaataactttctaatatatatatatatcattttatcatttatatagcatgtcatcgtttttaatgctacataaataatatcaattaaaaaacgaggcagaaaccaaaattgtatttgatttcaaatcctcgctccgtatctttactcgcatatactctataattcatttaataattctgatactgcatttttaccttgtaaaatacagtctggcaggccaaccgcttcaaatgaagcaccggctattcttaacctaggataattatgtttaatatgcgcttgaatcgcagatatgttatccatatgatccacacgatattgcggcatactattaggtaaacgattcacaatactgaaatctggtgcgcctttaaaagtcatcatttgtgttaaatctcgtttaacaatatctacaagttcttcatctgaatgatctttcacaaccgtatcacctggtttaccaacataagcacgtatcagcaccttaccttctggtgtagtaaaaggccattttttacttgtccatgtacatgctgtgatatcggtttggctcgttcttgcaatcacgaaacccgtaccgtcataggtattttcaatatgctgttcatcaaatgctagtacaacagttgcaacggttgtagatggcattgttttgaaataatcaagggctggatcattaccaaaccatttcataaaggtttgatgtggtgtggtaacaaggacactgtcgtagatatttttttcatcatctacaacaagctcataattcgtttgtgagatgacgatatcatctataggtgtattaaatctgatttttacaccttggtttacgacataatcagttaatttttcaataaaagaagtcagcccatgcctaaattgtttaaattggccttttggtgctcctggatataattgtcgttgtttttgacgttgcattttttcgtatcgcatacctttaattaaactaccaaactgttcttctctttctttaaactccggaaaagtagacattaaacttaattcatcaatgtttgtaccataaataccacccattaaaggttcaattaaattttctaagacttcatctcctagacgttcacgaaagaatgacccaacagaaatatcgcgttctatttgaataggctttttaaataaatctaaaccagcacgtaatttacctttaggcgaaatcaattttgttttaataaaaggtttaaggttagttggcacacctaagatagatccccctggaataggaaacagtttatttttagcataaatataagattgtcctgtttgattagtgataagttcatctgctaatccaatatctttagcaatgtctgtcataatctgtttgcgtcctagataagattctggacctaattcaatcgtataaccatcttttcgataggtttgaatcttaccgccagttcgattagtcgcttcatatatcgtcacatctatatctggtcgttgtttttttataaaatatgcactagataaacctgtgataccagctccgataatagcaatacttttagtcaaaataagtcacgcttcctttaataaacattttttatctcttcaacaattgcgccaataaatagcggatcagtatctggcatttttggacgatgataatgtacacctaattcatcacaaatcactttacattcataatcgttatcatagagtacttctaaatgttcacaaacaaaacccactggggtatagataaagtgttcatatttatgttcattgtataacgctcgagttaaatcttgaacatcaggtcctaaccaaggtgtacccgtattcccttcagattgccatccttcagctacatgtataatatttgaatgttgttctaataactgagcagtttcatgtaactcattaggataaggatcgttatttttctcaattaagccttttggcaaactatgagctgaaacaacaagaactgttttgtcatgttcatcttgtggaatatctgctaatgtttcattgattttctctgtccaatattgaatgaatttaggttgttgatagtaatgttcaacatgtttaaacgtgatgccgtatttatctgcttctttttgtgcacgtgtattgtaagagccaactgaaaagctagaataatgtggtgctaatacaactgtaacagcttcatctataccgtcttcatgcattgattgtacagcgtcttcaataaatgggtgaatgtgttttaaaccgatatatagtttaaattcaacgtcgtcataggcttgattgagcgcatcacgaagtgactctgcttgtctatttgtcgttcctgctaacggagataaaccaccaataaattgatatctatcttttaaatcttgtagttccgcttcagtaggttttttcccatgtctaatatctgtataataagcttctatatcgctttctttatatggtgttccataagccataaccaataagcctattgtttttgtcattttaagatcatccttttgtatcataatttttagatgcatatgccataattatttgtaattcgtgatagtcaaaatttatgtcgtactatctctgtgtgtagtcatgtacaaatgtagtcacacgttttaatgtttcgggcttcacctctggaaatacgccatgacctaaattgaaaatatgtttgccatgcgctatcccttggtctaatattgctttcagcctttcttctattacatcccatggtgccaataatagagatggatctaaattcccttgcaatgtcttatcaatgttcattgaactagcttctttaattgatagcctccaatccaatcccaatacatctataggtaatgtgttccattcatctgctaaatggctagcaccaactccaaatagaataacaggtacattatacttctccttaataccgcttatcaatttattcatcgcaggtttaatataatagcgataatcttgaacgttcaatgcacccacccaagaatcgaatacttggataatttgtgcacctgcctctatttgtgcagaagtataagttatagacatttcaactaagtgatccattaatgcaaaccatgtcgcttcatcactatacatcattgcttttgtaaagttatagttcttagaaggaccaccttcaatcatataacttgcaagtgtaaatggcgcaccagtaaatccaatcaatggcacattcaacttttcttcagttaataatttaatcgtatctaacacataaggtacatctctctttggatcaatgtgtcctaatttttcaacatcctgtatcgttttaattggattatgaatcactggacctataccagatttaatttctacatccacacctattggctgtagaggtgtcatgatatctttataaagtaccgctgcatctgtattatagttatctacaggcagatgtgttacatacgcacacagttctgcttggtgtgtaatttcaaataatgaatacttttcttttaatcttctatattctggctgagacctgccagcttgacgcataaaccaaactggtgtgtgcgaaaccgactcgccttttatcatatttaggatcgtattgtttttattatgcaccttttaatcctcctagattataatcattcttgtctataataccatattgcttaattacgcgtgttttattgttctaaaatgtcataaaaaagacaaacagtctcattttaacagcttaattatttgactattgttttataataaaaatcaattataatgttatcaaagcctattttatatttatttgaaaaagtagatatttttatagtaaagtgaaatagttaattatactttcatataccaagcaagggggacaatcttatgaaaatttatgcatcttatggaacgtttggttacttaaaccagattaggctaaataatcctgaccataacttattacaattttcagcgtctgattcttcagtcattcttgaagaaactgaccaaacttctgtattaaaacaacctttagtctatgatgtacttaaagctgagggagatttaaatgaaaattatttttattcggtcatatttgtacctacatcagaagatcatgcttatcaactagaaaaaagattagaaaatattactgctgactttaaacaatttgcgggttatcgaagctatcgtttcttaaaacctgatcaaggtttaacttataagatttactttggctttgaaagtagaacggcttatgaagactttaaagcatcatctattttcaaagataattttgataaattagcattaagtcaattctttggttctagtggccaacattctagttatttcgaaagatatttattccctatcgatgataattgatttaatgtaatgaacttaaaaacactgtttatgtcaaagcaaatgacataaacagtgtttttttaatctcgcaataacgtttcttgatattttaattttttaattacatttctaattgttaaccaacccactattaagaataataagccaaaataactgtataatgggaaagatatcgcatatacgataataaataaaatgcctatcataaacattaatctatataaaaattgttcataacctttaatcacttttgattctggtgttggccaaacttgtggccataaaccatatgcctgttgtgtataaaattgtgccatttgaagcaagataatatacataaacaaacttcctatgatcaaagtgattacgggttgatgcaaccaaaacataagaatgagcgcaataataactaaccttaatattatattaaaaacatctttccctcttgcgaagctcctaacgaataaatataaatacatataattctcattgaatttcttaaacttaggagttcgtaaaataggatccaaataacttcgtcgaaccgctgtttctttaaggtgtttgacatctgtaaacatatttacaaatttatagtaattcatatgatgttgttgctctgacttaatcattctttcccaaggaaacaattgatgcttattttgatattgaagtagtagtgttaagcctataataattaatatcgaagtgatacttgcaaatgatttggcatctaatgtcacataatagcctgatgcaaatacaataaaaagtaatgtatgcaatgaccaactttccaatttatacgtgtaccattgccattttaataataagcctacaaatggcatgattaacattaataatgcaaataatatataaaagccaaatgtctggtcattaatcacataaaacaatggaaataatacaaacataataacaacttgtaagccaatacgtgaaacatagctataaatcaaactttgcttaatatagtgattcatattgctttcgaatggcaataaaaataatttatctgcatctttaagcaacgtacgtaatggaaacattgacgttattgaaacgaatatactaacaataagtgaataattaatatgtttcggtattgatttaagccaatcaccgtagcctaatataaatgcacctaacataataactaaaaacaaagaaaaatgaccattaaaaataaatttattataatattgtttttctttacttatttcacgttttctagttttaaataattgttctgcatctcgtgtcatgaattttggccaccttgcgtgacatggatatagatttcatctaatgtcttaccttttagccctgtttgagcacgcaactcttccaagtttccaaaagcaactatttctccttcatccatgattaaaaatctatcacaataacgctctgcagttgctagtatatgtgtactcatcagcactgtacgaccttcttgctttttttccaccatcaaatctaacatagattgaatacctaacggatctaaaccaagaaatggttcatcgataatatatagttcaggattaactataaatgcgcatataatcatcactttttgtttcatacctttagaaaagtgacttggaaaaatatttaattcatcttctaaacaaaacgtttttaataatggacgcgcacgttccatagcaacttctctgctaatattatatgccattgctgtcatataaatatgttcttgtaaagttagttcttcataaataactggtgattctggtatatacgataactttcttctatatgtttcaacatcttgctttatatttatatcagaaatagacaagttaccttccataggtgttaacaatccaagcatatgcttaatcgttgtactcttacctgccccatttaatcctataagtcccacaatttcaccttgtgttaattcaaaatttatatttttaattacaggtcgttttccataaccacctgttaaatgttctacttttactgtcatatagcacctccacaaaatatattgtatcaaaaatctttaattagtcataaatttactgcaaaaactgacgtaaataatacagtaatgctataataggcaataacaatcttacaaggagtgaagattttatgtcagaaacaatctttagtaaaattatagatggtgaaataccaagtcataaagtatatgaagatgaatatgtctatgcatttttagatatatcacaagttaccaagggtcatacacttttaatccctaaaaaagcatctgctaatatttttgaaactgacagtgaaacaatgaaacatattggtgtcgcactgccaaaagttgctaacgctattaaaacagcttttaacccagatggactcaatattatacagaataatggtgaatttgccgatcaatctgtctttcatcttcatttccatttactaccaagatatgaaaatgatgtcgatggttttggctataaatgggaaacacacgaagaaagtatcgacgatgaacaaaaggctgaaattgcacaagaaatagccgctcaattcgattaatcatgcttaccttattacatatggggtatataaaaaatattaacggatgagatactactagaaatgaggagaatttttatgaaaacagctcaaatattattaggcctaggcgctggcgttgcaactggcctcggtgtagctttaatgaatcgtgataaaaaagattctagcctaaatactgcacgtgctaaaaaaccaactggtgctgaatcagaagtagatagagaaataaacacaattaagcaaagtgtgaatgacatagccaactatatttcacaaatcaaaactgaaagtactgaattcggtagttctatcggtgacgaagtaaaaacgatgattggtgatttcaaatctgatatcaatccaaatattgagaatttgcaatcacatattgaaaaccttcaaaaccgtggtgaagaaatttcaaaagcatttgataaagatgaaaaataaccactaattaaagtatcaattattgaactgttatctaacatttaaactaatgctagataacagttttttaattgaaaatacttttatgcatgctataaacttaactactcaaatgatggaatatatcttgacgtttcacatattaagatagataatacataagcatatatcatatgactttagtttaagaggagtgaataaacaatgtatctctgtacaagacaaatcgatatcaatgctcgatttggattaccaaggattgcatttctaagtttagttacaaccattattacatttctccttgcttatgaaatactctattttttttctaacacaaaactaactgatcaatattttttaatctttttactactcgtggttattttgtaccctatccacaaagccattcacctcatattttttattccatattataaatcgtttaaaaaatataaattgttacggcataaaaaaataccattttataatacgtatgtgaacacaccagtaaataagtattatttttgttttgatttaataacaccagttataatcatcactgtaatttgtgcttatttcagtacattgtttccacaatacggtcattatctgatgtttttaattgctttaaatatgggttattcagttatggattttctatatttaaaaatcattttattttcaaatgaaggtgattatatagaagaacatcaaacaggtattaatatattaaataaagttaatacgcattatgagaaaaaagtatagtcttgtttcataacgatttacttgtatgcatagataaatattacagaggtgaacataagtaatctaacaataggttacgatgtcacctcttttttgattaagttatatcaaaagtcacaaaacactaatactatagttgtagaaattatgtttctaattggtgaataatcaataatatgttatatttacgttgttattcttacaaaaggagtttccaactatgaaaacatttaaaaaagttttacttcctgttacagctagtgcattgttattaggcgcatgtggtaacagtgcaacagattcaaaagaagatacaattatttcttcaaaagctggcgacgttaaagtcgaagatgttatgaacaagatgggtgatgagcaaattgctaatacatcattctcaatcatgttaaacaaattgcttgctgataaatataaagacgatgtaaatacaaaagatattgataaagaagttgaaaaagaacaaaaacaatatggtggcaaagatcaatttgaaagtatgttaaaacaacaaaaaatgtctataggcgattataaagaacagaaaaaattacaagcttatcaaaaagaactacttaatgataaagtgagtatgtctgacaaagaaattaaagaaaataccaaaaaaggctctcacgttctaattaaagttaaagaaaataaagatgataaagaaggcttatctgataaagaagctaaagcaaaagctgaaaaaatccaaaaagaagttgaaaaacacccagataaatttggagaaattgctaaaaaagaatcaatggataaagcctctgctaaaaaagatggtagcttaggttatgtcgtcaaaggtcaaatggaagacaaatttgaaaaagcattattcaaacttaaagaaggtaaagtatctgacgtagttaaaacagattacggttaccatattatcaaagcagataaagaaaatgactttgataaagaaaaaggcaaattaaaagcacaattaattcttactaaaattcaaaaagatcctaagcttttaactgacgcttataaagaattattagatgaatataaagttgattataaagatagagatattaaaaaagcgattgaagactcaatattagatccagaaaaaatcaaacaacagcagcaacaacaacagcaacaacaatctatgcaacaaagtggtgctggcatgtcaactggacaataatttcataaatgaatcaagtggtatagaaacctattcaattagatttctataccacttttttcgaaaatgaaaaaggttcgagaacatccacaaatttctcgaaccttttaatattatatatccaacctaaaagaccttcattattaatctagcgatttaggattgtaaaattgtctaccatctaatccaaaaatacgttctgtaaattgacctttatcagttttcttataagctttttcaaacatattcattttcgcatctatattatcaatgaagaataatatttctgcctctttcatatgaggtaatttcggcgaaccaaattccattttaccatgatgcgctaaaatcatgtggcgtagcaataacacttcttcaccttcaagattcagctctcttgccgcttctgcgacttcatcactagcaattgaaatatgccctaataaattaccttcgacagtataggaagtagctactggaccacttaattctctaactttgcctaaatcatgcaaaataattgcgctatataacaaactgcgatttaacaatggataaatatcacaaattgattttgcaacacgtagcattgttaacacatgatagcttaaaccactcgcaaaattatgatgatgtgtactagctgctggaaaagtaaaaaacgcttcttgatgcttacgtatcaaatgtctcgtaatacgttgtaacgttgcattttcaatgtccaacatataatgcgatatttcctcttgaatttcatctggagtaagcggcgccccatcaacaaaatcttgcgttttcatattatcatctggtgtagctaattttatcttgtttatcttcatttgcttacgaccacgataattaattacatcaccagtaacatgtacgattttctcaggttctaatattttcatatcttctttactcacagtccacaatttggcttctatatcgccacttttatcttgtaagtatagtgtcatatagtccttaccttgagcagtaacaccttgtgtcgctttatggattaagaaaaaatgatctactgaatcacctggatttaatttttctacatttctcattatttaccgccttcctgaattttatctaaagtaataatttgttttgaatgcacactattatctttcacacatgtaaagtataggatttgataactgttaggcatttgtctcaaataattcatcatgatttcttttctttgcttatcaaaatgaacaaacgcatcgtctatgataattgggaacggataatatggctttaatgttttaattaaacttaaacgcaatgcaatgtataagatttcttttgttgattggcttaattctacgggttcatacatttgaccattaacttgtttaaccattaaattatcatttgcatacgtaacttgaacataatgaccatttgttaaatgcgcaaagatatctgttgcttcatttatcacttgtggtaaacgtttatctttaatttgtttaatatgtccttctaccaatgcttgtaaataacttaaacttgcccaatctttcgcttcagcattcactttatttttcaatatgtggaatctatgtcttaaatcagctaaagtcttatctgtttccatatctgtgattttggcatttaagtcacttacttcagattgcatttctaaatactgatcattatactcatcaacttgacgtgctaatacttcatcttcgttagtaagttgtgcagatgttttcgcacttaaacttgaacttgtatcataattataattttgattttccagatattttgataagtcattaaatctcgacatattttgatgataattttgatattgaacatgatgttgataatatgattcttcatcgttaacattaacaaaattgaataattggtcaatcacacggctattttcatttaatctactattcagttgtgaaacttcactttcaattaatttgatttgttcatcattacgtgtccatttttccaaattacttgtttcttctttaagccattgtcttatatcgtggaatagcgataattcattaaaatacgtaaattggtttttagttacttcttgcgcatgttcgtaaaaatcatttaattgttgttttaaggcttgtacctgcgtttgcaaatcatcgatatgcttttcatgtgttttaattttattcattgttccaatactatctacgattaattcatctgacattttatcagataaatataaatcagctttcactttatcaatgttttgttgcgcattttgatattgttcctttgcctgagttaaagtattggttaagtattcagccttcttatctattgcttcttttgttttgattgttgtttgtagctgttctcgtactctgtactgatcatccaagtcgaagtcaagatcatagttatcttcaagttgtgttacttgctgttgcaaatcttcaatttctttagagaaagattcactatgtccgacctctttcgttttaacaaagaatataccgacaataaatacgactgatagaatagcaaatataatcccgaaaatgatattcgcagatacaaatgagaagactgtcagtccaatgccaataatagccaatataattaaacttattcgcattaaattttgtttcttctcattctctctttgctctttatcaaatgtttctttcattttttgataaagattgtttttctcttgaagctcaaacacttgtctattatattgttttttcttttcaaagttctcttctggaacaatatctgcttcaagcgcattcatttctgcgtgatttgtatcattatcaattttattttcttcaatattacgttcgagttgttggatataagccatttgttcttgtttatattttatttgattactgacatgactcttcatagcttctgaaccatcgacttcatgatgaacagtttgccatccaatgtttgacttcaagccttctttttcacgttctttatcttgtatttctttatctaacgccttaacttcatattctttttgttttatttcattttcttgttgatgtaaatgattaaatgcatcaatgtcactttgccttggtactgttattttttcattttcggctttaagatgtgctaatcgttctgttcttaaactgatatcacgctttaaattttgagtttgtaactttgccgattcataacgatctataccttgttctggaaaaacaacaggctctatattcaattgggtttccaattgtttccactcttgagtctgttcaagtaaagcgagttctttttgtttacgttcatgcattttagatagctgtgctaaattttgttttaaattattaagtcgtctttctgctttatctttatcatctactaatcgcttataagaagttaattttgcttcttcttcacgaatttggccttctaattctttcagttgttctatttgttgattgataattggattgcgaccattttttttataaagttcttcctttttagtatttaatacctcacgcatagtcgtaaattcagtagagcctaaagcaccagcttgtaaaagataattttgtaattgtgtttcatccatatttttatgaatatcttgcaaacctaaaacatcgaatgaaaaaatcccttgatacgtacgtttcgagataaaattcagttctttttttaaccaactttcatctttaatgctaccattaggcaaataaactttcacatcaccagtcgcactgcctttaatacgttctacttcgacaagcgagccgtcatcttgaattaatgttaatttaccaccgtattgattacctaatcttggttctaaacgtggttcgttctctttttttgtaggaaatccaaagagaattgaatgaataaatgcttgtattgtagatttacccgtttcattttcaccataaatctgagtaaatgattcgtcaaattcaatttttctttcaataaatctaccgtatccataaatctctaatgatttgattttcatattattcacccctcatatctgacttcaataattcttcagcatgttcaattaatgctcttctatcgaaatcactataattttctagatatttagacgctttgggatttaaatacaaatcattcatagcaccgtcataaacagttgtatcatctattaattcaggcgagaattctttaactaatgtattttgatcttcatatttgtttttaattgagagttgttctacaaatacaaaatcatgctcattttcttcaaaatcacttatcatttcatgtacttgcaaaatatcttgttcagatatcaattgatctgaatttacaacaacattcaattgatagatggcttttccattttttctcacttgtgatttaaaagattgaatgtcatcaaaaagaccttgcttcgatgttttatccgattctatagttgctttttcaaatcttataaattgagtaggaacaaattgcgcgttgagttttaaatcgtccccttcaactaacaagcatcctttttcacccagctctttaaaatgtctgccttgaatgttaccaggataatgaatttgtggcatatcactcagttgttgacgctcatgaatgtggcctaaagcccaatagtgatataacttattatttaagtcttctagtctgaattcagtatatcgatcattggtatttgatttgctatatgtaccatgcaagataccaatatgtatgcctttttgaccttgacttgaaggatatgcatctaatttattttcataacttgcatcattttgataactaaaaccatgcaaataaatctcttcgccatttttagtgattgtttgataagtttcaacattttcagagaaaacggaaacattatctggccatactgtgccaatacttgctgataatggatcatgattcccgtgacataaataaacaaatatttgttctctctttaatcgttcaaactgttcctttaagaacacctctgcacgtagcgtgcggttatgttgatcaaataaatcaccagaaataatcataaaatctatttcttcatttaatgctaaatctactatttttttaaaactttcgtaagcacttttttgcatatcatcaaaaatagactgactaagataacttctagatttaaaaggactatctaagtgtaagtcagcgcaatgaataaatttcaccatacagtatagttctcctttattgaaaggtttatttgtacttatgcatataccacaattaattaacatctaagttatttctgtcacttgttaaattgtatgcataacaatcccttttatctctatattttaccatattgtttattcaccagtcgataaaactaagcgagcaatcactttgtttctctaatatctaccttattagtaaaaatccctttcaatcagtagccaaaatataatcaatctatatattcacaaaaaaatagaccaagacaaatatatgtctcgatctatttaaccatataggtcgcatcggtattgaactactacaaaatcaaatttataaaagataggattactgttttattctttaaccgactatattatttaaataatattcatttacattcaactaaaaattagtcagcgtaaatttcatctaaaggtttaacaatgatttggttgatttcttggaatacttggctcatattttgttcagcagccattaattcagaaatgtttgaatcattttcgattttttgagcttgttcttgtgctttttgtagctcttcttcaccgatttcttcaccttgcatttgtttttgttggaaacttaattgtgtttcacggaattcatcaaataaatcttttgattcttgattttctttaacttttgcataagcattttgaatagcttgatattcatcactttctcttaatgcttgttctaattgatttgcatgatcgtataaatttactgccactatgcttcactccttttttgtatatgtgtgaaaaccacatcgatattacaataacataatttaatatgttatacaaaaattgcaattacaccttggaataaaccgattatgccaccgagtaaaaatcccaaaaacatgattaatttcaattctttattagcgatatcaatgattaatttttcaatataagctaaatcaaatgtattaatttgttcttctaccatttgtctcaagtttatttttttcataattggagatagatgttttgacgcattatcaataattacatcggctaacgtcttagatacttttgtttctaagaatgaaataaagcttggcataatggtatgcaatggtttatgtgaagtttgttctaagtccacatatcttaatgctaattctgtcactgatgttttaaaagcttgatattgcgtttcatttatcaattcattcaactgtttcgatttcattgttgcatattcattttcaataatctgcgtagcaattgcttttgctttaggatgactcgttaatctaatgagttcatgctgtattcgctctgcaatgctttcttttgtcatgaacatttgtaacataccaacaatttttcctttttcgttgaagaatgtatctaacatagaagcaatatctgccccacctttttctgatttcaagtatacgcgtgctctatcaaataacaactcaggaagtagcgcaactttatcatctatactactttcaatgtcattaggaataagttgctggattggcgtattttgataatctaaataaaagttatccattttatctgaaattaattcatctaatttttgatttgctgttttagaaaaatcaatatctacaatgtctgctaatgattgtattgtcgtatgattctctttcaatttagcgatttgcttaaatataatctcttcaattgcatctctagaagttggtgcatttaacttagcttgaataacttcttctgtaagtaagtgttcttcaacgacttgaccaattttatccgcaatttcttttcttcttttaggtattaatccaggagtgaaaggcactctctttttgaaaatataatatgttttaaacgggtgaaacaacattttaacagcaatgacattggttaccccaccaatcagtgcgcctataaccatcataaagatgataactaaaaatgtctgcatgtgtatgactcctttgtttgcttaaataaatttcaaattttcttataatcatttttacattgtataacatataacgattcattgtgtagaaaaacattccaacattttacttataaaataaaaaaagacctaaatctatgtttaggtcaagtagaggtagagtgactaaatcattcatatataatatcacttcccatgactgataattatataaataatgattcttctatcactaattgaattaatattatacgtgcattaattcttctttagaaattctaccaaaataagtttcagcttctcttaattttgaagtaccaaatatcggctgtgtctcttgatttagcacacgatagatatcactcactttgttactttgtaagatgaagccattacgactatcaacagtgttccaatagatatcacttgttgtagaatggttaggatatgcacaatgattacgagaaatcgtttgtaccatttctagaggatcacatccaaatgtactatttaacacatctgaatctctaaataatgcacaaattgacacacatgttgtccagttaggtaatactctctctttttctatttgtaccaatgtctttttagaaagacctattgtttgggccatcgtatcttgcgtataacctgcttcaatacgtaccattttaaattttgtttgaattaaatctgtgaaactctgtctatccattactttaatctacctttcataaaagaatattttatccggacacaagaaattgcaataatacacgcttcttgaaacacaaattacatcataatacaatttttaggaaaataaaagagtgaaatgaaattttcattgttaattatcattggcgcaattatcaaaataatcaatcttatatcttataatattttaaaaacaaaaatcactttgtttgtaagcgtattattattgtgaaatgtgttatcaactcaaattacttattactcttttaagataaaaacactatttattattatagaccatttttcttgtttacgcatagataaactacaaatttctctaaattaatttaaatgatagcttttgtttacattattcaaaattttcattataatctgagttacttttaaaattttgaggtgcttaatatgaaaaatacatatatattactagctagatgtacagacagcgtaggtttaacgtcattaattacaacgattattgcggatcatggatctaatattttacatttagatcattttacagagtatgaaagcaaccaatctgaaaagggtaaattatttttacgcttagaatttgaacaagttacagaacttaaagaagcattagaatcgactttaaatcaatacgatataaaatttgaacttttcgataataatgataaaacgaaaatcgcattatttgtttctaaagaagatcacgcatttaacgaagttctattaagagtacaacgaggtgaattgcctgcagaaattgtatgtgtcgtaagtaaccatgaaacaaacagacattttgctgaatctttgtctattccattttattatgtgccaaataataaagagaaacaagaagtagagcaagagatacttaatatttgtagccatcacgaaatcgatctcattgtactagcaaaatatatgcaaattttaactgatcattttgtaagtcattatccaaaccaaattataaatattcatcattcattcttgccatcatttatcggtgcaaatccttataaacaagcttgggaacgcggtgttaaacttgtaggcgctacaagtcattatgttacgtcggatttagatgaaggcccaattatcgaacaggatgtcacacgcataaatcatcgctacagtgttcaagatttaagaaaaataggacgtcacgttgaatcaaccgtgctagcacaagcagtcgaatatcacgtacaacataaaattattgtaaatgatggaaataagacgattgtctttaattaacaaatattttttgtgtactattcactgtttcagagataaaaaacaaaatttttaagaattatatattttctaaaacatactattataaatagatacatttaaagttatctgaaactcattgtattgacttcagataactttattatttatatatagttccacttactcctgtaatatacttctttaatttacttatatatcgttcaattctgttatacaacagaatctgacgattataaaatgattatgcgatttcattaatttttttaaatttaatagactcgaaataccagtatattggaaagcaatgatctaatcgcactattcaataatctatttttattctccctatcatatgactcaaaatattctatgtatcacatgataattcatttacttacattccaaatataatgtataattattttcactaatattaataaaaactaaatatgaaagcgtgatatgttcaaatgaattcagtatggtttatattaaaggaacagttgacgaacctgtatttaattaaaagactagcagatttccaattacgaatttctaaccataacaactatttaggtgtagcttgggaaatcattaatccagcattacaaattgcagtatattggtttgtatttggtctaggtttacggaataatgctactcatgatgggataccttttatttattggcttattgtaggtataagtatgtggttttttgtaaatcaaggtgttttagagggtacaaaagcgattgtatcaaaatacaatcaagttgcaaaaatgaaatttccattatctgtcacacctagttacattgtatttagtagattttatggacatctcggcttattgttgattgtgttaatcatttgcttttcgggtggatatcacccttctatttattcattacaattattaatttatgtaccttatgccttaatattaacgactattatctcaatattaacatcaactttggccgtattgattcgtgatacgcaaatggttattcaatcgttaatgagaatcatattttttgtatcttccatattatacgcacctaaaaatgaaattgtggtaacagtcatgaaattaaacccgatttattttttagctgaaggataccgagccgccctattgcacaaagaatggtattttattaatcattggcatttaactgtttataattttgtacttgtcttgtttctttttatcgtaggagctgtcgtgcacatgcgttatagagatcattttgctgattttatgtaatttatcataataaagcccccttacattgatagaactactttttcattttatgaaaataaggcattcctatacataagctctagcttttgtattctatataaagtgtatccgcggctttatacatgtgcattagcttaaatgtacattattttccacttctcaatttaaccgcccttagctaaacaatgtaatcattattgaaactccaccattatccgacatttcatatatgtaatttgtaatagactattctcatgttatactcaattaaaataatttataagtaaatgttttgtcaatatatgacaaataaactttagattggggaattaattatgcaagtagatatcaatcatcccgtcattgctataagtgcttcgttaaaattttttcaattacaaactgtttcagggcaactcattttgctagatgatcgtatcatctttaaatctctagagacaatgcaaattggaaatattaaggagacatttttatttacagatatcaaaagcttgaagacaggtttctcactttcaccttttagaattacaataatggaccatgatggtgaaacatggatatttgatcaagtccatcgtaaagatgcaaaaaaatttgtagaactgtatcatgctattacataatacccatttagccttcatcatttttaatacaagttactaaaaaaatgtttgtaacagacaactgattatcaattaaatttgcctatcaaacgtgcaacttacttatgttattgcacatatattgcatctaatttaatcggctgtcactacttatctttatcatcttttctgccaaagaaataatcaataattaaaatgattaaaggtatagataatgttatgaatactgaataatgacctctctttataaaaaagtatgtgcatatcaccgttattattaaacaaattgctaagacaatcagtacatataatttatttttattcatatgcatagttctccttcaaatttagttcaatcacaagataacatatgatgcaaatcacttctaatttgatgatatccgtgtttcagtgtttatgattattaaaaatacgaacctattaaagcatatcagtacgcattaaaaagtctgagacaaaatagatgtctcagactttttcaattaggcagtagatgattgagttgaaaatataaagactcacttatttataaaaactatttttccatttttatagaaacaaatcgttcttttgcataagctaaagcttagatatgccacataaaaatgctagtgagacttatgtatgcacgttagctcaggtaaagctttattctagtcatctttgccttgattgcataggtaggacgacgtaatctatattagaaaatttgatttctatgccctaccctttattaatctatatttattcattaagtgtacgttcttttgctaactttctttcttcagcatttgaaataactaaagcacatgctgcgtcgcctgttatattgactgatgttcttgtcatatcaagtaatctatcaatccctaaaataataccgatggctgctggatctagtcctactgcatttaataccattgcgagcataatcaatcctacgccaggaaccccagctgtaccaatagatgccacaactgctataacgacaactgttataatttgcgaaacagataaagtcacgccagaaatttgagcgataaatatcgttgcaacaccttgcattatggcagtaccatccatgttaatcgttgcgcctaagggttgaacaaatgaagcaatttcccgtctaacccccatttttttcgtgcattctaatgatacaggtaaagtagccgtagaacttgaagcactaaaacctaatgtgatagctggaataaagtctttgaaaaactttaatggacttgattttgccataaatttaacggcagcaccatataccacaaagaaatgaatccctaaccccagtaagacaataaagaaatacatacctaattgctggattgccccaaatccagcaccagtaaaggcatgtgctacaagaccaaatgtaccaattggtgcaaagacactcataatcattgttacaatatacatgagtacatcattggtttgttctaaaaatttatgaaccatttgtgcctttgaacccaccatgataatacctacaccaatgaaaatagcaaatgaaataatttgcaacatattttcatccgtcatggcttgcaatggatttttaggaaatagattaattaaagtttgatcaaatgtttgtttggcggctgaatcttgtgaactgtcttctttctctaatgtttgttgataactggatacatcatcactatttaatagttctgattttccagcaccgggttgtaatactaaagccaatgtaataccaatgataattgcaatcgctgtcgttgttaaaaagaaggtaatcgtttttatacctatgccccctaataattttggatcacctacaccgactacccctaagacgatggaaacaaaaacaactggcactactaacataaagattaaattcagaaagatttgtccgataacattaaataggtatttatctacgttttctacaaaagctgtattcgaaaatacattaaagatagaaccaattgcaatacctaatactaacgctatgacgatctttaatgaaagatgcttcgttttcatagcaatatcccccttttagttattactatttattatatagtatttttatataaattaaagtaagaattcaccaaaatagatatattaccatgccatgacattatttatgatcgttttattacacactatattaaattgttttgcatagcataaattgccgcctgtgtacgatccgttacttgaagtttactaaatatatggctaacatgcgttttaattgttttctctgatacaaaaagtgtttctgcaatttctttatttgttttaccttttgccatttccgtaagtacttctgattccctttttgaaagcttgtttgcataatgtggctttttacttactgtttcaatgacatgttgtgcttgaggatgaataattttttctcctgcaagaacatgttttattgtttttattaattgctcaggctctacatctttcatctcataaccatctgcacctttatcaattgcagaaataacatgttcatcatcaatataacttgttaacactaatatttttacatttggatattttttcttcatccattctgtaatttcaataccattcatttctggcattactaaatctaataatacaatatcgggtaacgtgttgttttctagataatctaaaaaggtttgaccatctgaaaatccacctataacctctaaatcttctaccgttgataataaaaattctaatccttgcctaacaatatgatgatcatctacaagtataattcgactcataactttcttccttcctataacgacaacggcacgcttatatatattttagtacccttgttttcaattgattcaatatctaaattaccatttatcgctttcgcacgttgtctcatattattgattccatgtgaataattaaaatttgattgattcatattaaaacctttaccaaaatctttaatttccacgattaaagattgatgattttgcgtcaatttcacattaatctcatttgtattcgcatgtttcttagtattattcatagcttcttggataatacggtagacattttcttctattaagcttggtaaattaatcaaaccttcaacttttacacttaactcaatttgtaaaatatcactatagttatttaatgcatttactaatccttgttctaatccaacaggtttaagttgccagatcaatgaccgcatctcattcacggcttgttgacttgtatcttctattacattaaaagcattccgtgatacttcctctttcgtaataccctgggcagcatgtgcagtcagtttcacagaaaataataattgattcactgaatcatgtaaatctcgagctaatcgatttctttcactgatacgagcagcttctttttctttatttgtgagaataattcgtttgatagcagaacctatttgaaaagcaactgactctagtaattctaagtcctcttcactgtagcttgttttataaggtgtcgccacatttaataatccaaactgttcttctcctgaacgtaatggcaccgttgcatgatgtgtaataccatttgtttcagcatgatgtgcacgattagctaaattaatgcgagagcaatttataatatttgatgccttagttaactttttattttgatatgcttgaacacaccaacacgtgccttcacacatgtatttacaattgtctttggctaacgctcctggaagctcaaaatgcgagactaattcatgttgccctacatcatctataaagaaaatccatccagtagtaaaatccgttccttctataagatatctcaacgcgccatccatcatgctgtatgtttctgtttcttcatttaaaaattcagctatttctttaagtaatgcaagtcttgtcggtttttccatttaaccattccattccgttactactttaatatatattataccttcttcatgttaaattttaaaatgttgcttctacaacattaataaatgcattcatttaaattttaaatatagaattcatttgactaatatttttaatactttctttatggtatgataatagttgataatcaaggaggatactatgaaatttgaaatccctaataaatataatcaattaacattaagagaaatttttcaacaattgcacttaccaaaaaaagatttacacactttaaatatgtcgaaagcaattaccattaacgaatcgcctggaacgctcacgactaaagtaaatactggcgataatgtttatattccaacaccagatgaagtgagtaattacttacctagttaccgcttcgctcaaatttattatgaagatgatgacatagcaattgtcatgaaaccaaaaggtgtgaaaacacatccaaatgatttaaaagaaagtaatacattaatgaaccatgtcatttatacaataaaaagtgattatgtagaacctattcaccgattagaccaagaaacagttggtttattaatcgtcgcaaaaaacccactaatgaaaaaaatcttagaccgtatgctagaggaaaataaaatagaccgtatatataaagcaaatgtacatagtttattacctatcaaacctcagactatcgatatgcctattggtaaagataaatttcattctaataaacgtcgtgtctcttctacaggtcaatctgcaatcacacatattttaaattcaaaaatgattaaagaagacgtctgtgaattagaaataaaattagataccggtagaacgcatcaaattcgtgtacacttagcagaaattggtcacccagttattggtgatccattatatggtaactctacgttaagaaaattagaattaaatagtcacaaaatagaatttattcatccactcacacaagaaagtataactgtaagtttagacgatgaagtttaatcatataaaataattgcaataccttatctctattaaaataagctagcatactattaagtgtaaaaaaactgttgcatttgattattctgtagtcaattgctaacgttcaacgcattaaagtataaaacaaaaagagctaatccatatgataggattagctctcttaatttaaatatttgtattttcagtgctctatggagttttatttaggttcaaccatatcttctggtttaatccattgttcgaattgttcttctgtaacataccctgaatcaattgctgattcttttaaagtaagcccttcacggtgagcttttttagcgatactagctgctttttcatatccaatgtgtggattcaaagcagttacgagcattaatgattggtttaaataattatcaatattctctggaattggctcaataccaactgcacagttattattaaatgtgtccataccatctgctaataaataaattgactgcaaggtatttaataaaataactggtttgtatacattgagttcaaagttaccttgtgaacttgcaataccaactgctgtatcattacccattacttgaactgcaaccatagttaacatttcacattgcgttggattaaccttaccaggcatgatagatgaaccaggttcattctctggtatggaaatctcagcaagacccgcacgaggtcctgaagctaaccatcttacatcattggcaattttcattagatctgttgcaagtgctttaagtgtaccatgcaattgtacaacttcgtcatgtgctgttaatgcatggaatttattttcagatgatacaaaaggatagcctgtattttcagctataaatttagctactttgtcaccaaactctggatgtgcattaattcctgtacctactgcagtaccaccaatagctaagtttaaaatatgcgcttttgattcacttaacaacgtttcacatttatctaacatataacgccaaccactaatttcttgacctagtcgaatcggtgtagcatcttgtagatgcgtacgcccaattttaataatatcgtgatattgttcttctttttgtttaaacgtatctctcagtgtttttaatgcaggttctaattttgtttcaacttcattgtataatgcaacatgcattgctgttgggaatgtatcattagaactttgagatttatttacatcatcattaggatgaatagactcatcgataccttgctcttttaagtaagtattggcaacataacttacaacttcgtttacattcatattactttgtgtaccactccctgtttgccaaacaacaagtgggaaatgttcatctaattctttatttaatacgcggtcacatgcatagacaatcgcatcttttttggcatctgataatttacctaatgcatgattagctaatgctgcccctctttttaattgcgcaaatccgtatacaacttcaattggcatacgttctttacccactggaaaattacgtttacttctttctgtttgtgcaccccagtatttatctgcaggtacttcaatttcaccgaatgtatcatgttctattcttactgacatttataattctccccttcattattcattgttcgctattagtatagcattaaacattttataggagcaatcgtattatatagcgttttcataattcaattgataattttaaaatacataaacaacaacacattgatattttttcttttatatgaaaaggtagcaggagagtaatcaaattttttaatcgtttgtttaaataagtgagattttaccttttcaattcagtcatctactgcctaaatgaaaaaaagcgtctgagacatctactttgtctcagacgcgataattggaaatacaattaaaatttttatattagatgaatgaacatagtgacgtacattttattaatcttaaaagctctattattaaaaattgtcttaacgctctttagtgatattaacacttttaaattgattttttgccgcttgaatcacgccaactgcagttaaaattaataagatcgcacctatcactaatgtaactggactaattgttattaataatcctaggaaaccatctaaattatcataaaagctacctaaaggcttaaataataatacagttataacaatacaacataacacactaataatgacgcctgtttgattactttttacaaaagttgatgcattcacttgatctactaaaccttgtgataaattaatttgtaatttaataattttgaataatactggtaaataaagcgctccaattgccattggaaaaccttttatagaaattaaatttacaataacagcacttatcatgatatatttccaatatttgcttaacatttatataattctccttaaatcaataatgctttaataataacacattcacatttaacatggcatttctttttttaccacatgacttcgaaaataatcgtcatcacaattacacaaaaaacctttgtgaaccataataattcacaaaggtggcttaaactattcatttaaatcggaacgtactgctgggtcatgtgatttatctaatttatcttcatcattttcttcagagatttgttccatttcttttcctaattctacgacatcctctaaatcatcaaccatcgcgttttctgactctaattcatcacgatgtagattattttgatttttatctaaactcattgcaatcacctcacatataaattatgcaaaacgtgcagtgaaataatgtctaacatcttctggtaaaccttcagcagccgcttcatctaaaataacattaaccatacggtgcgcttttaaatctgaaggttcaaaacttgttttaccattttcttcataaagtttatgaacgacttcttttttatcgctacctgtaataattaaaataacttcacgtgccgagaataaaccttgattcacacttacatctaatttaccatttgtatcaatagaaagtacttgtgtaatcaatttccctttattttctttagttttgattttatctttaataaatgattccgtatcttcaccaaatgaaacattgaagatttggccttctggaacaccaagtgcttcaaagtatgatttattgttatcataatccagaatattaatttgactaaaatctactgcatgtttatcaacatttttctttaattcatccaatactggtgcattgtcacttgaaaggtgtacgccagcaattgttgttggattgttgttaaattgttttcttaagatatctgcagcatattccgctacaacttgttcattttctaaaactttaaagttcattgccatagtaattacactcctctttgtctattaagacgcgttctagcattatttttattattacccttgttacagtaaccataaactatttacttaatttaacttatgattcttctgatttaaattatatttaggcttaacttcattatacaaagctttaactataatttcattcattttaaacaattaatgtaacccagggaaactttgttgtcttaaagcttcgtatataagtaatgaagctgtattagatagatttaatgatctaatattatcattcattggtattcttaaggcagtttcagcataagcatcttttacccaatcaggtaatccagttgtttctcgtccaaatatgaaaaagtggtcatgttctgtatctgtgaaatcaaaatctgaatacgtctttttaccaaatttagtcaacaaatagtatgtaccatctgtgttttcaaaaaatgattcaatgttttcataataggtaatgttcacagattcccaataatctaagcctgcacgttttaacattttatcatctgtactaaaacctaatggcttaattaaatgtaaatgtgtatatgtaccagcgcatgttctagcaatactgcctgtattaccaggtatttgtggctgaaataatactatatggtttgtcatgcttttattcgctcctcatttcaagtccttttatcatttctacttggacttcttctatttcatcattataatgttgttctataaaaggccttgccgcttcaccttgaatttgacctattgcccaatatgcagtaccacgaatcatgggtctaggatcattcaaagctacttcttgtaattctgatattgcagtttcatctttaaaatgcgctaatgcgacgatagcattccgctgtatcggtttcttccctctccatgcacctgctaaatgaccataagtgtttttaaattccttattactcatttgcaacaaaggcgccaatctaggtttcaaaatttctggttctaatacgatatcatcatgttgagtattgattcctttatttcttggacaaacttgctgacatgtatcacaaccatataaacgattaccaattttataacgatattcatcagctaaataccctttagtttgcgttaaaaagctgatacatttttgactatttaattgtccatcaccaacaagtgctccagttgggcaacgatcaacacaaatggtacaatcaccacaactatcgattaacggatcatctggtggaaaaggtatacttacaagcatttcacctagatatgtccatgtacctaattctggattaataacaaaaccgtttctacctacgtaacctaagcccgcgcgttcagcaactgcgcgatctgaaagtacaccagtatctaccattgattgtatttctacaccaggtactttttcttctaaatacgcacctaatttatctaggcgtttcctcataatcgaatgatagtcttgtccccacgatgctcgtgcaaacataccacggcgatcaccacgaacacttttaggagcgcctttcaatttattaggataacccactgcaattgcaatgattgatctagctgtcggcagcgataacttcggttcagttctcaattcgatatccgattcttcgaaaccagatgcatagcctttcgcatgatagtcagctaacttttgtttcaactcatcaaaaggatcagctgtagtaaaaccaatactatcgataccaattgtatgagcataatctatgacatcttgtttcaattggtttaaatccatttaattacaccccacattaaaaacatacattccatagtttaacacattccgaagtgtttagcgtatgacgtattttagtttttcatgacaaaattaaaaaccaagtatctaaagttacgattattaattaatctaactttaaatgcttggtttcaacagcttatagtactctactcaagaagtttttagttctttcatgttgttgatgatcaaaaatatctgttggcgatccagattcaacaatcacgccatctgccataaagaccactttatcacttacatcccttgcaaagttcatttcatgtgtgacaacgaccattgtcataccttcttttgctagatctttcattaccttaagcacatcaccaacaacttcaggatcaagtgctgacgttggttcatcaaataataacacttcaggattcattgccaatgctctagcaattgcaaccctctgcttttgtccaccagataattgagagggataagcgtctgctttatctgctaatccaaccttttcaagtaatgatttcgcctgttgttttaaattagcgatattatcttttttcaataaacttggcgctaatataacattatctatgacctttttatgaggaaacaaattaaaattttgaaataccatccccatttgttgacgtaaggtttctaactcagtgctgttatgagttaaatgttgttctttaaaaataacttccccactagtcggtgtttctaacaaattcatgcaacgaagtaatgtacttttcccactaccagaaggaccaatgattgcgacgacttcaccttgattaaccgttaaatcaattcctttgagcacttcatttttaccaaaagatttatataaatttttaatattaatcactaactttcattctcccttcaaagtaatacatcactctagataatgtgaatgtaagaataaagtatagtattgcagcaacgattaatggtgtaaatggatcaaatgacgcaccttgtacaacttgtgcattgaacattatttcactaacaccaatgactgaaacaattgacgattctttaattaccgttacaaattcattacctaaagccggtaaaatatttttaatagcttgcggtaaaataactgacttcattgtctgaccataagttaaacctaaactacgtgctgcttcagtttgtccactatcaacagcgttaatacctgctcttattatttcggcaatatatgctgaacaattaattactaaagcaatcataccgcatataagcgctgatatatttaatccaagaactgctgttgttccaaagtaaacaaggaatacttgaactaaaagcggtgtccctcttaggaattcaatataagctgaagcaagccaacttaataatttaattttgcttaacttaagtaaagcaataccagcaccaaacactgtccctaatagaacaccaacaatggaaattaatatcgtgttctgaataccttttaagaagaaattaccatacttagtgaaaaaattaccgtcatcttttttcattgcttctgccgcagaagctttataatccttaattaaattattatctttaacatctttgatagatgcattcaatttttccattaattttggagaatgtttcggagcagctattgctgtactttttgtaccttcattaaatttaacattttcagcaaatgttaaatctttattttgtttcaaataagcttcagctactggtccttcgatgaccattccttttaccttaccactctttaatgacatgattacttctggaactctagtcaaagattgtacctgtgcattatcaatttcactctgagcaattttttcttgttgtgtttgtttttgaacacctatttttttatttgcaaaatcatcaatatcttttaaattatctgcatctgatttttttattatcattttttgttggactgtcatatatgggttagaaaaatctacttctttttcacgctctggtgttggtgtcataccagaaataattaaatcgactttcccagtcttaattgctcccaataaactgtcaaattgcatatttacaatttttaatttcagatgattatctttagctatttttttagctaagtcaatatcgatacctgcatattccgatttaccatttacattatgctcaaattcatatggtgcataatctgcagataaacctacgcgtaattcaccacgcgcttttattttatcccattgatcctgttccgctccatgtgcaacagggctaatgtaagttaatataccgctactaattaaaataacagtcataatcaatttaatcatgtgtttcattttctaacccctttctatataattcattattatacataattacgaaataatattcaatataattttaggaatctatttaaacttatataaacagctaattacctcaaattctgtcccttgagtataaaaaagagagcctgggacaaaactagatgtctcagactcttgttcaattaggcactaaatgactaaattgaaaatgtatagcctacttattttaaagaaactatttttcctattcttatggaaacgagtagttcttatgcataggctaaatcttatatataattatagtgaaacttatacatgcacgttagctcaggcagacctttatcatagttatctctgccttgattacataggtggaactacaaaagacccactagaaaatttaatttctgccctatgcttcataatcaattacaggttgctgtcatgcttgttaatatacattaatttatactccataccttaaagtaaaatatatagacatagaaaataatgaaaataatattgacactataataaacttaaagttttagatttttagacttaactacacctatacaataccttgaaaatgtatagatattcattttcttagataaccaactgccatacacaaattcaaaacactttattgttttggtatttcaaatctatatatgtcatctgaataattgcctatgaattttttacataattcatgtacaaaaaatgctgctacaaatggaataataagataaccaaaaattaaaaggataatatttattactggatcaccatccatccgattaaatgcgtttattggccctactaaacctgtataaccaaaaccagcagacattggtgtcccttgaattcctatgaaataagcaattaaccctcctatgataccattaataactaaaggcaccgcgatgattaaatgtttaaagtatactggaatcatcattttagctgcaccaataattaatacaagattgacacctgcaccattcactcgtattgaaccgaataaaaatgttacacaagctgctacaatacccatattagctgcaccacttcctaaaccagacaaaccaattgcagtggcaattgctaccacagatatgggtgtaaccattaataaagaatatgtaacacagataaggatagacatcaacataggattcagttctgtaaaagaactcactaaatgtccaattcctttcgtcacattcgatacataccctagtgtataaatacctataatgccacttacaaccggaatcactaccggtaaaataatcatttcaagcgatcctaatttgttttgaagtattaaatataaaaaacaggctaccatgactactaatatcgtatttataatatctccaataccatttaacataaaaccgtttgatgttatttttactgccccactaccaagcattgcagaaacgccaaccatcgttgcaccagcaccactaaatttaaattgatgcgctgctaatactccaataataaaagccataaatgattgaattaatacaaccaattgatacactgattctaataattgattatcttctttgaagaattttaataactctcctaacattgcattcggtattaatgcaattacaacaccagcacccacagcttgaagtatgttgctaaaaaattgtttactactattatttttagttttactcttagacattcattttcctccaaataaagcattagactcataatattatactttcttaaaaaccacaatataaagttataatggtaaatataatatcaatgatttatattctttttttaaatttaaaacaaaacgtatatttgacataaaaaaagaacctcgtagatacgaggttcaaaaacaaacagagtctgtttattactatagttataccggtggtcgggatcgaaccgacactccaagaaggaacgggattttgagtcccgcgcgtctgccaattccgccacaccggctcaataaaaaattgagcgatcacttattttacaaaaagtaaccgtttatgttcgaaacagcataaatacattatataacttagaacttttgtcgtcaatagatttcttaataaagagcgtaatcactagcttttgaaagaaaaacaccttactaaaaaagtataaattgtcactattcataatatctttgccttataaataaattaaactaattaccacgtcttaatttaaataaattcatcatttttaattagaagcaaattattaagtacagatcaaattaactatttacttaaaaatcaatctaaaattatttcattttccttttcaccaatcatttgtgttatttggttaaattcattcattacagctactttaggtacgtgatttataagctcagtttcatttaattgaacatatgtcataataatcacaacatcgtctacttctactaacctagaagcagctccatttaagcatatcttaccacttccacgttctccttcaataacataggtttcaaaacgtgtaccattattattatttacaattgccactttctcattgggtaatatatctactgcttccaatatatctttatcaatcgtaatactacctacatagtttaaattagattctgttactcttgctctgtgaatttttccattcatcattgtacgtatcatagaaattatagctcctatagttcaaatttttaattatacataaatcaagtattaattattacttcatataacataaccatttaataataccacattgattaagacgttaaaataatatttacctcaatataaataaacaacaatccaaagtgattattaaatttatatacttaaaaagtgtaaaaaaaaacttcctcaatggaagaataaatggagcggaagataggacttacacctatacctcattccgggaaggaatgtgttctaaaagttgaactactcccgcaaaataatatggagcggaggataggacttacacctacacctcgttccgggaaggaacgtgttctaagagttgaactacccccgcatgggatataataatttaatatggagcggaagataggacttacacctatacctcattccgggaaggaacgtgttctaaaagttgaactactcccgcatattgttgaaggcggcaaccggatttgaaccggtgataaaggttttgcagacctctgccttaccacttggctatgccgccaataaaaaactgggctagctggattcgaaccagcgcgtgatggagtcaaagtccattgccttaccgcttggctatagcccaataatactaagggcggatgatgggaatcgaacccacgagtgtcggaaccacaatccgatgcgttaaccacttcgccacaaccgccatggcaggggcagtaggaatcgaatccacatcaaaggttttggagacctctattctaccgttgaaatatgcccctattaaattaaataaatggtggaggggggcagattcgaactgccgaacccgaaggagcggatttacagtccgccgcgtttagccacttcgctacccctccaaaagatggtgccggccagaggacttgaacccccaacctactgattacaagtcagttgctctaccagttgagctaggccggcttgcattaaaaatggttcaggacagaatcgaactgccgacacatggagcttcaatccattgctctaccaactgagctactgaaccataataaatggcggtcccgatgggattcgaacccacgatctcctgcgtgacaggcaggcgtgttaaccgctacactacgggaccttttaaaaattgcgggaggcggatttgaaccaccgaccttcgggttatgagcccgacgagctaccgaactgctccatcccgcgttaataatataaatggcggaggaagagggattcgaacccccgcgagccgttaagctcctgtcggttttcaagaccgatcccttcagccggacttgggtattcctccacaaatattagctaaaaataaattatattcaattattacaaagatggcggaggaagagggattcgaacccccgcgggccgttaagcccctgtcggttttcaagaccgatcccttcagccggacttgggtattcctccaaaattatatggaccttgcaggactcgaacctgcgaccgaacggttatgagccgttagctctaaccaactgagctaaaggtcctaaatataatttacaactaataattagtggcggtggaggggatcgaacccccgacctcacgggtatgaaccgtacgctctagccagctgagctacaccgccgttgtattttagtttgtattaaatatggtggagactagcgggatcgaaccgctgacctcctgcgtgcaaagcaggcgctctcccatctgagctaagcccccatatataaattttcagggaatcgggaagacaggattcgaacctgcgaccccttggtcccaaaccaagtgctctaccaagctgagctacttcccgtaaattagtgcgcccaataggggtcgaacctataacctcttgattcgtagtcaagtactctatccagttgagctatgggcgcataatttttataggatgatgccgaggaccggaatcgaaccggtacgataatcacttatcgcaggattttaagtcctgtgcgtctgccagttccgccaccccggcaaaataatggagcagaagacgggattcgaacccgcgaccccgaccttggcaaggtcgtattctaccgctgaactacttctgcatatgcgggtgaagggagtcgaacccccacgccgtaaggcgctagatcctaagtctagtgcgtctgccaattccgccacacccgcgatattaaaatgataatggtgagccatagtgggctcgaaccactgaccctctgattaaaagtcagatgctctaccaactgagctaatggctcatcaaaatggtgccggccagaggacttgaacccccaacctactgattacaagtcagttgctctaccagttgagctaggccggctaaattaaataaatggtggaggatgacgggttcgaaccgccgaccctctgcttgtaaggcagatgctctcccagctgagctaatcctccatataaattgcctggcaacgtcctactcttgcggaacgtaagtccgactaccatcggcgctaaggagcttaacttctgtgttcggcatgggaacaggtgtgacctccttgccattgtcaccagacaatgaaatgtatgaaattatacattcaaaactagatagtaagtaaaatatgattcaaccaaacaaaacatttaaaatttgattaagtcttcgatcgattagtattcgtcagctgcacatatcgctatgcttccacctcgaacctattaacctcatcatctttgagggatcttataaccgaagttgggaaatctcatcttgaggggggcttcatgcttagatgctttcagcacttatcccgtccatacatagctacccagcgatgccgttggcacgacaactggtacaccagaggtatgtccatcccggtcctctcgtactaaggacagctcctctcaaatttcctacgcccacgacggatagggg

SEQ ID NO: 31 - DNA, 37257 bp, Staphylococcus saprophyticus
ggtgacactttaaaagtgcacgtacgtattattgaaggtacacgtgaacgtatccaagtattcgaaggtgtagtaatcaaacgccgtggtggaggtatttcagaaactttcactgttcgtaagatttcttcaggtgtaggtgtggaacgtactttcccattacacacaccaaaaatcgaaaaaatcgaagttccacgtcgtggtaaagttcgtcgtgctaaattatactacctacgtgaattacgtggtaaagctgctagaattaaagaaattcgttaatcagcatattaagcatataaaaagcggttctcattatgagaatcgcttttttatttaaatatatagcccacgacgattagtaaatggcaaagtcgtgggcttttaatatgaccaaatagggactaaaaaaatatgtccttaaatttctctttttgaagattttgaaatgcgctttgtaaaaataatacttgagatgatacctatcaccgtcaaaataattaatgttttatggtaaggtggtgcatatttgagtttgattatttcttgtcctttatcaacaggaatgacagtcattataccattaccttgctttacagtgacttttttatctccttcataggcttgcatcccatctctatacgccattggcaagactaagtagcctgcatcatttttatgcttatgaatcgtatagccattacgttgttgtgtgactttaacagcgtctaatgaactagatgcatggcgcaaggtatgataatcttcgccatatatgcctttaacattcactcgatacttacctttagacaatttaagattaagtttttcgtttgctttaaccctcattgtgactggtgttacaaaacgtctatatttataagataactcattacgatgttgattgtattcgttaataccaacgtcatgttccttatctggagaaagtaattcaacatccatttcaacgtacatatctttatatttattagcaatagacgaaggcaattggtaacttataccaccattgtctttttctataatcagttgatgattatctaatctgtgtgcatcttttagtgttgcagaagcatcggataataagtttttattcggcttgaacgattgattggcttctgtattattgtcaaaaacgacaccttgtagcatggcttgttctttatctaagggtgattttaaatcattcgcattataaaccttatctgtaatgtgtgcacttggataatggatttgattaactgaatgtataaatgattcttttttagaatgatgaactatatctttctgtgtaaatccatagggcatatttaaatcatcaggccgacgaatacggtcctctacatgccataaagccattaagttggcgcgattagataataaacgatacgtgctgtttttatctgtatgcatattgatttgtagtgttttatcataatattttaaaatatcgccatcgaaaatacttgaatataaagcaatgccattaaaatggtaaatcattggtgaatttaatccatattgagacatataatcgatacgatgtaatggatcatcttgctggtggtttattgcatttatttttttggctaaagctgggctatgataatcagagtcctgtatggcttgttttgtagattcatatcttttcacattattatagtaatcattagataatatgaatgcttgttgaattacaaataaaactattatggataccttaaaccaatgattttgtaataagtttttcttaaataataataaagcgataaataccataagtatgaaacaaataatcatccatgacattttttgatctgtaacgataatattcatgactagcatgatgagacatactggaatgcaggttaagatataggctttcagagttaattccgataggtgctggataaatagggcgattaagccagcagacatgattgcaaatatgtatacccatctacgttctggagttgaaaatccattgaacatgctatcgaaatgtggtgtaagtgacccaatcaacatgatccacgtagcaattgcaaataatctataataataatgtttgtatagtttaaaagataataaagcgaccacagttattatagacactgtaatataaaaaccatttgtgaaaaaatgcttttgacgtgcgaaatcagtgaacagtggaattttaaaatacgggttactaactcgatcgttattgaaaaatgaagtaacgcccgtataaaagccccagatgcctattaaagtacttaaaataactgcaataggaatcaaaataagttgttgtttccgagaaaccaaatcagttggatgtggaaagataaacctataagcgacgtatgctaggaggacaatcgcttcgtaataactaaaataaaaatttgaaaataaggttagtgcaatggcgaatatgaataaaccaattttcttttctttataaaatcgttcaacacctagtaatgataaaggaaggaaaataagtaaatcaccgtaatacgaccaagtgaaattaaaataaatcgcagtcgttgatgaagcataaagcattgcagcaagcaacgtagcataatttttaaattttaaatatctaaaaaagtaaaatgaaatgacaaacgtgacaacacctttgacaaaagcaacaataatttgattgcttgcccaataacttatttggttaggatgactattaaataaaatctctgaaaaccaaacaaaaatgaagttaatccatgttaaaggtgaggtcgaataataatatgataagtctttaacataatcgccacctagcccaaatgagtgatcataaaattgtttgaattggctaaagtgttcataaaggtacatttgaaagggcatcatttgcctaaaaccgtcacctgatccactaaatacattaccttgcgttatatatcgatagatgtacggtgtaaatgttaatagtgcaactaaaatgcccattgctataatacaaaataatcttgaaactttgtgagaccaaagtttacgaaacatggttatacctcatctccgacaaactccttttaaattatgaatttatttgtttttatatctctttctcataaaccatgatagcgatcctataatgaaaataattgaaatagcagtaaccgtataccaatattttggacgatatttgattatgatttctttgctatcttttgaaactggcacgccagtcatcatataattcacatttaatggtttaatttttttgttgtcgacatatgcagtcatgccttcacgatacggtatattaatcgtagcgattcctttttcgtgaggacctaacttaaccttcacgccatttttaatatctgtataatgtccatcgttattttgctttgcatatgctgattttaaatgattgtagttttcaccatgcaaactttgaatatctagatagtaattacctgttgggcttagcccaacatttatattaccatttttatcaggttgtgttctataaagttgtgtatccacacctgttcgataagtcgaattgttgtacaagcggttatttgtatagttatttatttggactgaaaaattactatctggtagaccacgtttgactttaatcgttaaataaaagtcatgataacgttgtcttaaatgtttaggtatatgaatttgtacatggctatcgtttttagaagcatgtatttgatgattgcgtttgttatttatatctttgtacgtgatacgagtttgatttaataaatttggtgcctttgccgtataagatgcacctttattatttaaaataacgccatccatcattgcatgttctttatcaatagggttatgtaaatcatttgaattatactttttattagaaacacgtacagatggtaaatttaaagtgttttcataaatttcatattgaccatcgtttttaatctttttgaagtatgcaggaatattatgttgatagcgcttgaccattagatatttaatagaaaataaactgctcatattttgacgcccattggttgattgatatctactcactgattcttcttgcatattgatttttagctcatcatagtaaaaatctaatatgtgatgatcaaatatactagaatagatacttagtcctttaaattgttgatacatcggcgtattgtcttgttcattgacacgccaatctatgcgctcatcttcaagtttatgtgtattcatatctttaactaattgctgttgtaatggtgtgttaaaaaggcttgcattcacaaaataagcattagcacgtttgacatggtcttcaaaataaatttgatttcgtataaatacagtagaaactaagactgttaaaatcattattgataaaacaaataaatgtgtaagtttaagtttgatatgagattcattgattaatagaattaaaaagccaattaaactcactatgggtgcgaaccaaacccatgctacaacatcatcataataccatgcacttaagccaataatacttaatgagataacggatgaaaaaatatagtttggtatagaaattgtccgaaaatattttacatataagccaattaaaactgcagaattaaatgctattaaataatgccaacgtttttgtggcgctgaaaagccattaaatatctgatcgataaaaggaacaaaactagcacaaattaatataagcgtagaaattgcaaataatttgaaataataatgtttgtataatttgaatgataataacgcctgaccagtgataaataatattacgattaaataattatcataaaaaacattggtattttgattgaatggctcaaataaatctacattgccgtcaaaaggtgtgcgtctattattaaagaaactttgaattgctgggaaaaagaatggaagactacatcctaatccaataactgatgcaataaataaagacatgaaagacttgaacctaggaatgatatcagcttgatgtctaaacactagtctgatagttaaataaattaatccagttaataattgataatatgcaaaataaaaattattgattaatgtaatggctactataatgataaagaaaccaatcttcccactttttaaaaaacgttcgattgaccacaataacaacggtaaccaaataaaaacatcactgaaaaatggccaatatactgtgaacctgaaatagattggtgaaattacaaaaatgaacgcagctagaacggcaatttttttatttaaagctatataacggacatatagataagtcgcaagcattgcaatcgcagatttaaaaatagaaacaatgagtgcattggtcatccaaaacataatatgagtagtatccagtgttataaacgtctttaataaaacaattacaatcacatttatgataaaaataatatttgtggagaagtaatagcttaagtcactaaaaaaatcaccaccgagtccaaaatctgaagcataaaagaaattaccatgatgccagttatcaaatagatacatttgaatcggcaccatttgttccataccatcattaggacccgtgaataaaacactatcatgaataaatctatatatgatgtaactatggccaacgactgccaatgttacgaataaacaaagatataataatttttgtttcataggcaatctcctatttatttgtttaatataattctattgtatctacatttttagtatttagataaaaataactattattatttagaaaaattttaattttgaatgttaggtttttaatttttacaaagaaaggttagaaatttaagttattgtttaatgaatcattggtattgtaaataaaaatgaaaatatcatgcacttgctgttttttttgttgtaaaattaagaatgaacagtgattatctaattaatttgtttataacacatgcaccaacgtgttatgatgctaaagcaaactaaacggtatgaacgaataaaataataaacaaaattgataaaagtcataagtaatagaagggtgagatatatggtaattcagtggtatccaggtcatatggccaaagcaaaaagagaagtttcagagcaattaaaaaaagtagatgttgtatttgaacttgtagatgcgcgcataccttatagttctagaaatccaatgattgatgaggttatacaacaaaagcctagagtcgttattttaaataaaaaagatatggcgaatttaaaagaattagagaaatgggaatcatattttaaagaaaaacgcttttatccagttgcaattgatgcgaagcatggtaaaggtctaaaacaagttgaacaaactgctatcaaagcaaccaaagaaaaatttgaaaaagaaaaacaaaaaggattaaaaccacgtgcgattagagcaatgatagtagggatacccaatgtaggtaaatcaacattgattaataaattagctaataaatcaattgcaaaaacgggtaacacgcctggtgttacaaagcaacaacagtggattaaagtaggtcaatcgctacaattattagacacaccaggtatattatggccaaaatttgaggatcaattggttggaaaaaaattaagtgttacgggtgcaatcaaagatagtattgttcacttagatgaagtggcaatctatgcgttagactttatgaaagcacatgattatgacggtttaatacagcactataaaatagatgtttcaaaagaagcagaaaatatagagtggtttgatgcgataggccgtagaagaggattgttaagacgaggtaatgaaattgattacgaagcggtcatagatttaattatacacgaagtgagaaacgctaaaatcggtacgtatacatttgatattatttccgaaatggacgtgtaatggattatgagcgaaacgataaaggacattaaaagtaagttacagcatatgctgtcaataagtgaattagagcgaagtgaatataataatgatgcacgcaaaggtgtgcaaaatgcaatgatacaaagacgtaaacaattagaaaaagaacaagtgttattagataattatgtgaaaatgacggaatttgaaaatagcatcttagcagaaaatccagacgcgcttatttgtggtatagatgaggtggggcgtggtccattagcaggtccagttgttacatgtgcagttattttaaataaaaatcatcatttcacagggttaaatgattctaaaaaactttcagcaaaacaaaggcattcaatcgaaggtcaattactgaatgatgtgtatgcttatgcatatggatatgcttcggtggaagaaatagatgaaataaatatttatgaggcaacgaaattagcaatgcacagagcgattgaaggattgagaattaaaccaacacatctacttgtagatgctatgacattggatattgatataccgcaaacatctttaattaaaggtgacgctagaagtgtttcgatagctgctgctagtgtcttagctaaagaacacagagatcaatatatgcgagatttaggtagaaaatacccaggttatagttttgaaaacaatgttggatatggtacgcaacaacatttagatggaattaaaaaatatggcattttaaatgaacatcgaaaaacatttgaaccaattaaatctttggtaaattaatagttaaaataaaataattggattaagtaggataaatgagtttacaatagcgctttcatttcttataattgaatatgaacttaacctaagaaacaggaggatggagaatgaatatccacgagtatcaaggtaaagcaatatttcgttctatgggcgttgctgtcccagaaggacgcgtagcatatactgctgaagaagcagtagaaaaagcaaaagaattagattcaaaagtttacgtggttaaagcacagattcacgcagggggcagagggaaagcaggcggtgttaaaatcgctaaatctctttctgaagttgaaacttatgctaaagaattattaggtaaaacacttgttacacatcaaactggtccagaaggtaaagaaattaaacgcctttacatagaagagggctgcgatattcaaaaagaatattatgttggttttgtcatcgatcgtgcgacagatagagttactttgatggcttcagaagaaggcggtactgaaattgaagaggttgctgctaaaacacctgaaaaaatattcaaagaaacaattgatcctgttgtaggattagcaccatatcaagctagaagaattgcttttaacattaatattcctaaagaatctataaataaagcagctaaatttttagtatcactttataatgttttcatcgaaaaagattgctcaatcgttgaaatcaacccacttgttactacgggtgagggtgaagttttagcattagatgctaaagttaattttgatgataacgcattatttaaacataaagatattcaagaattacgtgatttagaagaagaagatccaaaagaaatcgaagcttctaaatacgatttatcatatatcgctttagatggtgatattggttgtatggttaacggcgctggtttagcaatggcaactatggatacaatcaatcacttcggcggtaatccggctaacttccttgacgtagggggcggcgcaactaaagaaaaagttactgaagcatttaaaattatcttaggtgatgaaaatgtaaaaggtatctttgtaaatatctttggtggcattatgaaatgtgacattatcgctgaaggtattgttgctgcagttaaagaagtcgagcttactttaccacttgtcgtacgtttagaaggtacaaatgttgaaagaggtaaagaaattcttaaagaatctggattagcaattgaaccagcagctacaatggctgaaggcgcacaaaaaatcgtaaaacttgttaaagaagcataaggaaaggatgggagcacgaagatgagcgtatttattgataaaaatacaaaagtaattgtacaaggtatcacagggtcaactgcccttttccatacaaaacaaatgcttgaatatggtacacaaattgttgctggggtaactccaggtaaaggcggacaggttgttgaaggcgttccagtattcaatacagttgaagaagcacaaaaagaaacaggtgcaacagtatcagttatttatgtaccagcaccatttgctgctgatgcaattttagaatgtatcgaagctgaactagatttagcgatttgtatcacagaacatattcctgtaattgatatggttaaagtaaaacgttattcagaaggtaagaaaacacgtatagtaggacctaactgtccaggtgtcattactgctgatgaatgtaaaattggtatcatgccaggatacatccataaaaaaggtcatgtaggcgttgtatcacgctctggtacattaacatatgaagcggtacatcaattaactgaagaaggtatcggtcaaacgactgcggttggtattggtggcgacccagttaatggtacaaactttatagatgtattaaaagcatttaatgaagatgatgaaactaaggctgtcgttatgattggtgaaatcgggggtactgcagaagaagaagctgctgaatggattaaagctaatatgacgaaacctgttgtaggcttcgtaggcggtcaaacagctcctcctggtaaacgtatgggccatgctggtgcgattatctcaggtggtaaaggaactgcagaagagaaaattaaaacacttaacagttgtggtgtaaaaacagcagacacaccttctgaaattggtacaactttaattgatgcagctaaagaagctggcatctatgaacaattattgactgtaaaataattttatttattaaaagtcagcgcaaattccgatagtatgtcggagtttgtgcttttttaggttgtatgagctgatattaaaataaaaaaatgcatttgataaagtattttatatagtagaaatgcgaccgctaaattaaagataaatacaattaatatctccaattgaaacatcagatgttgtcaatttaggaatttaaaattactctttaaaatcatatgacttattacgatcatttgacaaaattttgtaatacgcagcatatatattttatcgtataatatgagatataaaggagtatgataaatgaacgatttagaccttttaaagcttcgatttgctggactatctacacaacaaatacatcgattattaagattttctccctcttttatgaaatatagtaaggtagataaacaatacatactcaaacaatttttgggaacagtaaaaataactgcaaaaaatgaaaatgtataccgattatatgtgacaactaatttagaagtactattcaaacaattaaaagcatggaaagttcatttcataacaattaatcaccgtttatatccacagttattgcgagaaatttatgatccacccctaatcctattttatcgcggtaagctcactttaatgcaatctcctcgtaccctagctattattggatctagacaagcgacacaatatacatggcaatcacttcaaacattttttccttcatttaaaaaacatcatttgacgataatatcagggcttgcaaaaggtgcagatatgatggcgcatcaacatgctttgttatttaagttacctacaattgcggtattaggatttggacatatgcatcattatccgaaagaaactaaagagataagacagcaaattgaaaaagatggaatagttataagtgaatatctccctctcgaaaagcccaaaagataccatttcccagaaaggaatagattgattagtggactttctaaaggtatctttatcacagaatctgcagaaaatagtggtacaagtatcacgacgcgatttgcattagaacaaaatagagatgtgtatgtcttacctggtacaatatttaataaaatgacattagggaatttgcgtagtgctcaagaaggggcgaaaattgtattgaatgcggatgatatattagaagattttattatatgaaaagtaaatagcacacaactttaaaacagattttatttaacgcttttttttaataatatatgaaaaaatactgctgattgataaagtttgggatgaaataacggtataaatttaatcaagtcaaaattaaaaacattgacaaaaacaaaatacaccgtttatcatttatctttgtaattagaaaatgcaagggggtaactactttggcagaaaatttagtcatagttgaatcgcctgcaaaagctaaaaccattgaaaaatatttaggtaaaaaatataaagtaatcgcatcaatggggcacgttagagacttgcctcgtagtcaaatgggtgtagatgctgaaaatgattatgaacccaaatatattacgatacgtggtaaaggtccagttgtaaaagaattgaaaaaacatgctaagaaagcgaaaaaagtattcttagcgagtgaccccgaccgtgaaggtgaagctattgcttggcatttagcgaatatattaaacttggaagattcaacagaaaatagagtagtgtttaatgaaataacaaaagatgcagtaaaagatagttttaaacatccaagaggcatcgaaatggaactcgttgatgcgcaacaagcacgacgtattctagatcgtttagtcggttataatatctcacccgtattatggaaaaaagttaaaaaagggttatctgctggtcgtgtacaatctgtggcattaagactagttatagatcgtgaaaatgaaattagaaatttcaaaccagaagaatattggaaaattgaaggcgaatttagatataagaaaacaaaattcacagctaaatttcttcattttaaaaataaaccatttaaattaactgaaaaagcagatgttgaaaaaattactacgcagttagatggcgatcagtttgaagtgactaaagtgactaaaaaggaaaaaacgcgttatccagctaatccttttacaacgtcaacacttcaacaagaagctgctcgtaaattgaatttcaaagcacgtaaaacaatgatgttagcccaacaactatatgaaggtatagatttgaaaaagcaaggtacagttggtttaatcacttatatgcgtacagattcaacaagaatctcagaccaagcgcaatcagaagcgaaaaattacattcaagaaacatatggtaatgactatacatctaatcgaaaatcaaaaggtcaaggcgatcaagatgcccatgaagccatcagaccgtctagtactttacgtacaccaaatgaaatgaaaaatttcttaactagagatcaacatagattatataaattaatttgggaacgttttgttgccagtcaaatggcacctgcaattttagatacagttgcaatggatttgacgcaaaatgacatcaaattccgagcaaatggacagacaatcaaatttaaaggttttatgactttatatgttgaaaccaaagatgacagtgaagatggtaaagataacaaattaccaaatattggtgaaggtgaaatggttacagctacgaacattgaaccatcacaacattttactcaaccaccaccacgctatactgaagcgcgtttagtgaaaacaatggaagaattgaaaattggacgtccttccacatatgcaccaacgatcgatacaatccagaaaagaaattatgtgaaaaatgaaagtaaacgttttgtgccaactgaattgggcgaaattgttcatgaacaagttaaagattacttcccagaaattatcgatgttgactttacagtaaacatggaaacattattggataaagttgccgatggtgagattggctggaaaaaagtgatttcagatttttacagtagtttcaaacaggatgtagaacgcgcagaagaagaaatggaaaaaatagaaataaaagatgaacctgctggtgaagactgtgaagtctgtggttcacctatggttattaaaatgggtcgttatggtaaattcatggcttgttcaaatttcccagattgtcgaaatacaaaagctattgttaagacaattggtgtgacttgtcctaagtgtaaagaaggcgacgttgtagaacgtaaatctaaaaagaatcgtattttttatggttgttctaaatatccagagtgtgattttgtaacttgggataaaccgataggaagagattgtcctaaatgtgagcattacttagttgagaaaaaacaaggacgtaagagccaagtagtatgttcaaattgtgattacaaagaagaagagcaaaagtaatatagtatagcgaatttacgcttgcaatcgtatttatgaaagaaatagtttaaacaataacagcaacttatgacacatatatataatgtagatgcatgtatttatatttatgatacgatgtctaagttgctttttaattatgggaggaaatcgaatgactcaagttgtaaatgtagtaggtgctggtttggctggttcagaagcagcatatcaattagcgcaacgaggcgtaaaagtaaatcttatagaaatgaggccggtgaaacagacacctgcacatcataccgataaatttgcagaactcgtatgttcgaattcactacgaggcaatgctttaacaaatgctgtcggtgtacttaaagaagaaatgagacagttagattctttaattatcagtgcagcggataaagcgcgtgtgcctgccggtggcgctctagcagtcgatcgacatgattttgctggctatgtgactgaaacattaaaaaatcatccaaatatcacagttttaaatgaagaaattaatagcatacctgaaggatatacgattattgcaacaggtcctctaacgacagacaagttagcaaacgaaattgtggaggcaactggaaaagatcagttgtatttctatgacgctgcggcaccaattattgaaaaagacagtattgatatgaataaagtgtatttgaaatcccgctatgataaaggtgaagccgcatatttgaattgtcctatgacagaagatgagtttaatacattttacgatgcgctcatggaagctgaagttgcacctgtaaatgaatttgaaaaagaaaaatactttgaaggttgtatgccgtttgaagtaatggctgaacgtggtagaaaaacattattgttcggtccaatgaaacccgtgggtctcgaagatcctaaaacaggcgaaagaccatacgctgtcgtacaactacgccaggatgatgctgcaggaacactatacaacattgtaggtttccaaacacatttaaaatggggagctcaaaaagatgtcatcagattaattccaggattagaaaatgttgaaatagttagatatggtgtcatgcaccgtaacacattcatcaattcgcctgatgttttaactgaaacttatgaattaaaaggaagagaagaactttatttcgcaggtcaaatgactggtgttgaagggtacgtagagagtgccgctagtggactcgttgcaggtatcaatgtagcacataaaatgcttaacaagggagaagtcattttccctagagaaacaatgataggtagcatggcatattatatttcacatgccaaaaatgaaaaaaacttccaaccaatgaatgctaactttggtttactaccaacattggaaaagaaagtaaaagataaaaaattacgttatgaaaaattagcagatcgtgctttaacatatttagataattacaaacaaacgctataaaatattgtatttttataattctttccgaaaattttgaaagttttactcaatttaatagttatttttcgcagacccctctgtcaatatgctacaatttatgttgatggagggggttttattggaaaaaatccaacaagcgtatttatatatgctaaaagtagaaaaacaattttcagagcacactttaaaatcctatcatgatgatttagaacaatttaatgttttcttagctcaagaacatttagatttgaatgcgtttgaatacaaagatgctaggaactatctcagttacttatattcaaaaaacttgaaaagaacctcagtttcacgtaaaatttctacgctgagaagtttttatgaatattggatgacacaagatgaagcggtggtaaatccgttcatacaattggtacatccgaaaaaagaacattatttaccacattttttctatgaagaggaaatggaagcattatttgacacggttgaaaatgatgcaaaaaaaggcttgcgagatagggtaatcttagaactactttattctactggtattagagtttcagagttagtgcatataaaagaacaagacatagatatgacgtcgccaggtgtaaaggtattaggtaagggtggcaaagaacgttttatcccctttggcgagttttgtaaacaaagtatggaacgatatttagcgtcattcaaacctaaattaaatagtaatcacgattatttattagttaatatgaaaggcgatcctatcactgaacgtggcgttcgttatgtattgaacgacgtagtgaaacgaacggctggtgttacagagatacatcctcataaacttagacatacatttgcgacacacatgttaaaccaaggtgcagatttaagaacagtgcaatctttgctcggtcacgttaatctgtcaacaactggtcgatatacacatgtgacaaatgaacaattaagaaaagtatatttaaatgcacatcctcgtgcaaaaaaggagaattaaataatgagtacatctatacatgcaacaacaatatttgcagtacaacataatggacatgcagcaatggctggagatggtcaagttactctaggtgaacaagtcatcatgaaacaaacagcgagaaaagtgagacgtttatataatgataaagtattagctggttttgctggaagtgtagcagatgcgttcactctatttgaaaaattcgaaacaaaattacaacaatttagtgggaatttagaaagagctgcagtggaattagcacaagagtggagaggcgataaacaattacgtcagctagaagctatgttgattgtaatggatgaaacatcaatcttagtagttagcggtacaggagaagtaatcgcaccagatgataatttgattgcaattgggtcaggtggtaactatgcgttaagtgcaggtagagcgctaaaacgtaatgcaacacatttgtctgcgagcgaaatggcttatgaaagtttgaaagttgcttcagatatttgtgtatttacaaatgaccgaattatagttgagaatttatagctgagtaaataaattaatgaaaatgtctaaatttagaattaattggcaatagtaaacatgtataaattataagttgttttaaagcacaaaattaatggaggtaacgtatcatatggagacaaatggaataaaattaacacctagagatattgtatcaaaacttaatgaatatattgttggtcaagacgatgctaaacgtaaggttgcaattgcattaagaaatagatatagaagaagtctattaactgaagaagaaaaacaagaggtcgcacctaaaaatattttgatgattggacctacgggtgtaggtaaaacggaaattgcaagacgtatggctagagtagttggcgctccatttattaaagttgaagcaactaaatttacagaagtaggttatgttggacgtgatgtagaaagtatggttagagaccttgtagatgttgctgttagacttgtaaaagatcaaaaaaaggcattggtacaagatgaagcccaagataaagcgaatgaaaagttagtgaaattgttagtacctagtatgaagaaaaaagctaataacaatacgaacagtaataacccattggaatctttatttggtggttcaatccctaattttggtcaaaataatgatgacgaagaagaaacacccactgatgaagtgaaaacgaaacgttcagaaattaagcaacaattattaaatggtcaattagaagatgagaaggtacgcttaaaagttgaacaagatccagctgctatgggcatgttaggtacgaaccaaaaccaacaaatgcaagacatgatgaaccaattaatgcctaagaaaaaagttgaaagagaagttccagttaaaactgcacgtaagatattaactgatgaatttgctgatgaattgattgatcaagaaacagctaaccaagaagctattgaattagctgaacaaatgggcattatatttatcgatgaaatagataaggttgcgacaaataatcaaaattcagggcaagatgtatctcgccaaggtgttcaaagagatatattaccaattcttgaaggtagcatggttcaaacaaagtatggtactgttaacactgaacatatgctatttattggtgctggagcattccacgtgtctaaaccaagtgatttaattccagagttgcaaggccgttttccaattcgcgttgaactagaaagtctttcagttgaagattttgttcgaatcttgacggaacctaaattatcacttatcaaacagtatgaagcgttactacaaacagaacaagtaacggttaaatttacagatgaagcaattaaacgattagcagaaattgcattccaagtaaaccaagatactgataacattggtgcacgtcgattgcatactatacttgaaaaaatgctagaagatttatcattcgaagcaccaagtatgcctaatgcggttgtagatattacaccacaatatgttgatgataagttgaaatcaatttcaacaaacaaagatttaagtgcatttattttataatataaatataaaggagtaggaatatgagcttattatcaaaaacgagagaattaaatacacttttgcaaaagcataaaggtattgcggtagattttaaagatgtagcacaaacgataagtagtgtgacagtaacaaatgtttttatagtttcaagaaaaggtaaaattttaggttcgaatttaaatgaattattaaaaaatgaacgtatcatccaaatgttagaaaatagacatatacctgtagaatatacagatcaattgatggatgtgaaagaaacacaatccaatattggtattgataatgtactaactgttttcccacctgaaaataatgatttattcggtgatagcagaacaacaattttcccaattttaggtggtggcgaaagacttggtacattagttctaggacgtgtgacagaagatttttctgaaaacgacttggtattaggtgaatacgcagctacagttatcggtatggaaatattacgtgaaaaacataatgaagtagaacaagaggcaagagataaagcagctattagtatggcgatcaactcattatcatattctgaaagtgaagcgattgaacatatatttgaagaactaggtggtaaagaaggcttactgatcgcttcaaaagttgcagatagagtcggcattacacgttcagttattgtaaatgccttgcgtaaactagaaagtgcgggtgtaatcgaatcacgttcattaggtatgaagggtacatttattaaagttaaaaaagacaagttcttagatgaactagaaagaatcaaataaaattttactgcgtaacgacttaattgagaacgactaatagatgggcttagtcgttctttataatgtgtaaattaatggacaaaaactattgatttgcataggtaaatatgatatatttattgacggctatgaagccaatacacacacagaaagttaaagtataaagggtgcgatatttaattgtcgtgtttatatgagctttttgtggaggtaataaaccaataggaggaattttattatggcagtaatttcaatgaaacaattgctagaagcaggtgttcacttcggtcaccaaacacgccgttggaacccaaaaatgaaaagatacattttcactgagagaaacggtatttacattatcgatttacaaaaaacagtgaaaaaagtagaagaagcttataacttcattaaacaagtatcagaagatggcggaaaagttttattcgttggtacgaaaaaacaagcacaagattcagttaaagctgaagcagaacgtgctggtcaattctatgtaaaccaaagatggttaggtggaatcttaactaactataaaacaatttctaaacgtattaaacgtatctctgaaattgaaaaaatggaagaagatggcttattcgaagtattacctaaaaaagaagttgtagaacttaaaaaagaatatgaccgtttaattaaattcttaggcggaattcgtgatatgaaatctatgcctcaagcattgttcgttgttgaccctcgtaaagagcgcaacgcaattgctgaagcacgtaaattacacatcccaattgttggtattgtagatactaactgtgatccagatgaaattgattacgttatccctgcaaacgatgatgctatccgtgccgttaaattattaactggtaaaatggcagatgcaatcttagaaggtcaacaaggtgtatcaaatgaagaagtagcagctgaacaaaatattgatttagatgaatcaaaagaagctactgaagcagaaacaactgaagaaaacacttctgttgaatcaaactaagaataatgtaaaatgggtgataagatattgaagcttatcacctttttttaaaataaataaaataaaattcattaaataatggaggaatttgaaatggcaatttcagctaaacttgtaaaagaattacgtgaaaaaactggcgctggtatgatggactgtaaaaaagcgttaacagaaactgatggtgacatcgataaagcggtagacttcctacgtgaaaaaggtatcgctaaagctgctaaaaaatctgaccgtattgcggcagaaggtttagtacacgttgaagaaagaggaaacgaagcagcaattgttgaaatcaattctgaaactgacttcgttgctcgtaatgaaggtttccaacaattagtgaaagaaattgctatccaagtattagatactaaagcagaaacagttgaagcacttttagaaacaaacttaccagatggtaaatcagttgaccaacgtgttaaagaagctatctcaactatcggtgaaaaattaagtatccgtcgttttgctgttagaactaaaacagacaacgattcattcggtgcttatttacacatgggtggacgtattggtgtattaactgtagttgaaggttctactgatgctgaagcagctaaagatgttgcaatgcacattgctgcaatcaaccctaaatatgtttcatctgaacaagtaagcgaagatgaaatcgctcatgaaagagatgttttaaaacaacaagctctaaatgaaggtaaaccagaaaatatcgttgaaaaaatggttgaaggtcgtttacgtaaatatctacaagaaatttgtgcagttgaccaaaactttgtaaaagatcctgatcaaacagttgaagctttcttaaaatctaaaggtggtaaactagttgacttcgtacgttatgaagtaggcgaaggcatggaaaaacgtgaagaaaactttgctgacgaagttaaaggacaaatgaaataacttttcataagttaaaacaaggaagaagacaccttttgtgctccgtatgaaagattcacttttgtattggaagacctattgtgtcttctttacttgtataatttacatatttttacaatagagaggataagacaatggctcaaacttctaaatacgaacgtgttgtattaaaattaagtggcgaagcactcgcaggtgacgatggatttggaattaacccaattataatcaaaagtattgcaaaacaagtagctgaagtagctaaattggactgtgaaattgctgttatcgttggtggcggtaatatttggagaggtaaaactggtagcgatttaggcatggatcgtggtacagcagactacatgggtatgttagctacagtaatgaatgcattagcattacaagatagcctcgaacaattagaatgtgacacacgtgttttaacttcaatagaaatgaaacaagttgcagaaccttatattcgccgtcgtgcaatcagacatttagaaaaaaatcgtgtggtcatctttgcagcaggtataggtaacccttacttctctactgacacaactgcagcattgcgtgcagctgaagttgaagctgatgttatcttaatgggcaaaaataatgtcgacggtgtttattctgctgatccaaaagtagatccaaatgcaatcaaatatgagcacctaacgcatatccaaatgttacaagaaggtttacaagttatggattcaacagcttcatcattctgcatggataataatattccattaaatgtattttcaataactgaagaaggtaatattaaacgcgctgtcatgggtgaaaaaataggaacattgattacaaaataattagaggtgtatgactatgagtgacattattaatgaaactaaatcaaaaatgcaaaaatcaatagacaatctttcaagagaattagctaatatcagtgctggtagagcgaattcaaacttattaaatggtgtaaatgttgattattacggtgcgccaacaccagttcaacaacttgctagtattagtgtgccagaagcacgcttattagtcatttctccatatgataaatcatcagttggcaatattgaaaaagcaatcaatgcagctaacttaggtgttaatccttcaagtgatggagaagttatccgtatcagtgtaccagcattaactgaagaacgtcgtaaagagcttgttaaagatgttaaaaaaattggcgaagacgctaaagttgcagtaagaaatgtgcgtcgtgactcaaacgatgagcttaaaaaacaacaaaaaaattctgacatcactgaagatgatttaagaacacaaacagatgatgtacaaaaattaactgacgattcaataaaagaagttgaaaaattgttagaagaaaaagaacaagatattatgtcagtataaacatggtaatgatgataatggcttcaatcattaaggcgatataattgaacttatattgttgctgattaagaggctaatcatatttttatctgaactgtatcaaatcagactttggtacagtttttttatttgtttattcaatgcaacaatctagtatgataaaatggtagataattgcatctagaacctattataataaacatagatgatcacgctcggaggaaataccatgtttaaaaagttaattaaaaaaaataaaaatcagccaatccaatcagagtttggcttggacttacataacatacctgaacatgttgctataatcatggacggtaatggtcgctgggcaaaacaaagaaaattgcctagaattaaaggtcactatcaaggtatgcaaacagttaaaaaaatcacaaaagttgctagtgatattggaattaaatatttaacattgtatgcattttctacagaaaattggactagacctgaaaatgaagtcaattatatcatgaacttgccagttaactttttaaaaacatttctaccagagttgatagaaaataatgtaaaagtcgagacaattggttttatggaatatttgccatcatctacactcaaagcaatcgctaaagccaaagaagatactaaagataatacaggtttaaaattaatcttcgcgattaattatggtggtcgtgctgaaatattaaacagtgtaaaaacaatctatgatgaactaactgctaaaggattaactagtgatgacattacagaacagatgattgatgatcatttgatgacacatgcatatcctgacccagatcttttgataagaacatcaggtgaacaaagaataagcaatttccttatttggcaagtatcttacagtgaatttattttcaatgaaaagctatggccagatttcgataaagaagaattaataaattgtattaaaatttatcaatcacggcagcgtcgatttggtggattataaatagttaggagaatagtatgaaagttagaactttaacggcaattatagcacttatcgttttcctcccagttttacttaagggtggccttattctaatgctattttcatatttattggcattcatcgctttaaaagaattgcttaatatgaatatgattaagttcttatcaataccagggataattagtgcattaggtattttaatcattatgttacctcaagatgcggggagctgggttaacgaccttcaattaaaatcgttaatagcaatgagttttattttattaagttatacagtactttctaaaaatagattcagctttatggatgcggcattttgtctaatgtccatcgcatatgtaggtatcggatttatgtatttatatgaaacacgctcagaaggtttacattacatattatttgcgtttttagtggtttggttaactgatacaggtgcgtatatttttggtagattgatgggtaaacacaaattatggccagtcattagccctaacaaaactgttgaaggctttgtaggtggtttgatttgtagtttaatcgtaccgctagtaatgatgatctttgtagatttcaatatcgcactatggttattgctaatcattacgattattttaagcatgtttggtcaattgggtgacttagtagagtcaggattcaagcgtcactttggcgtaaaagattctggaagaattttaccaggtcacggtggcattttagatcgttttgatagttttatgtttgtcttaccattattaaatattttattaattcaaatataatacatttacgatatgacttttataattttataaaaatgcgaaaggagttaatggattgaaataactggttatttaataacagttaatgatattcttaactccttttgacaaggtcgaaagatttcacaatgctaaattaaattttcaatatttataagttagcatgttgataactgttgaataaaaatgattagagttacgtgtatgacaaagtatagttgtggtatacttttataacttaaagttggtagtatacattactgacacattgcattttatccaacatgcagttaatttattaagaaaatatgaggtgtatcaaattgagttttctagtaacaattatttcttttatcattgtttttggtgtcctcgtaaccgtacatgaatatgggcatatgttttttgctaaacgtgcaggaattatgtgtccagaatttgctattggtatgggacctaaaatatttagttttagaaaaaatgaaacattatatacgatacgactattaccagttggtggttatgtgcgtatggctggtgatggtttggaagaaccgccggtacaaccaggtatgcatgttaaaataaaattgaatgataaagatgaaattacacatatcattttggatgaccaacataaattccaacaaattgaagcgatagaagtgaaacaatgtgattttaaagatggcttgtatatcgaaggtgtaacgccttatgatcaagaacgtcataggtataatattgctaaaaaatcatattttgttgaaaatggtagcttaattcaaattgcaccaagagatagacaattcacgtataaaaagccttatcaaaagtttttaacattatttgctggaccactatttaacttcttacttacattggtattatttatcggtcttgcgtattatcaaggtacaccgacaaatggcattgatgaagtcatgaaagattcaccggcacaacaagctggtcttaaatctggtgataaaattgttaaattagatgataaaaaaattgaaactaaaggcgatatagatagtgttgtaaaaaatattaaagataataagacagaagttacggttgaacgtgatggaaaaacacatacgatggatatcaagcctaaaaaagtagaacaaaaagtgacgaaaactaatacacaaactagatatttattaggctatagtgcaagtaccgaacatacaatatttaaaccaattgcagctggtgttgaacaatcactagaggcgggtaaattaatatttacagctattgtaagtatgattgccagcatatttactggtcatttttctttcgatatgctaaacggaccagttggtatatatcacactgtggattcagtagttaaaacaggtatcattaatttaatttcttggacggcactattaagtgttaacttaggcttaatgaacttgttaccaatacctgcactagacggtggccgtattttattcgtcatatatgaagcgatatttagaaaaccggttaataagaaagccgaaacaacaattattgcgattggtgctgtttttgtacttattataatggtcttagtgacatggaacgatattcaacgttatttcttataaaagggagagaggtagttaaatgaaacaatcaaaggtatttattccaacaatgaaagaggtaccagcaggagcagaagcactgagccatcgtttattactgaaagctggtttaattaaacaaagtacaagtgggatctatagttatttacctttagctgcacgcgtactgaataatattgaagcaattgtgcgtgaagaaatggaacgcatagatgcggttgaaatcttaatgcctgcattacaacaagcagaattatgggaagagtcaggtcgctggagtgcttacggtccagaactgatgcgtctacaagatcgtaacggacgtgaatttgcattaggaccaacacatgaggaagttgtaacgtccatcgttagagatgaattgaagtcatacaaacaattaccacttacgttattccaaatacaatctaaatacagagatgaaaagcgtccacgcttcggtttgttacgtggtagagaatttatcatgaaagatgcttattcgttccatgcggatgaggactctctagatgcatcttatcaagacatgtataacgcatacggtcgcatatttaaacgtgttggtattaatgcgcgaccagttgttgcagattcaggagcaattggtggcagtcacacacatgaatttatggcactaagtgaaatcggcgaagatacgattgtgtatagtgaacagagtgactatgctgcaaatattgaaaaagcggaagtagtctatcaagccaatgaaaaacatgaagatttacaaccattaacaaaaatagaaacaccaaatattcatactgcgcaagaactggctacattcttagacaaacccttagacgaaattactaaatctatggtatttaaaatagatggagaatttattatggtcttagttcgtggtcaccatgaattgaatgatattaagttaaaagcatactttggtacggataatattgaattagcttctgaagacgaaattgttaatcttttaggtgcgaaacctggctcgctaggtccagtttttgataaagagattaaagtctatgccgataatttcattcaagatttaaataatattgtcgttggtgcaaacgaagatggctatcatttattaaatgctaatattggtcgtgatttcgaagttgatgctttcggagactttagatttatattagaaggtgaaccattatcagatggctccggaccagctcgctttgcagagggcattgaagttggacaggtatttaaattaggaacgaaatactctgaatcaatgaatgcaacatttttagataatcaaggtaaagcacagccactattaatgggttgttatggaattggcgtatcaagaacattaagtgcgattgttgaacaaaacaatgatgaaaatggcatcatttggccaaaatctgtaacaccatttgatttacacttaattacgattaatcctaaaaaagatgatcaacgtgaattagcagatcaattatatacccagttaaaagaaaactacgatgttttatatgacgatcgtaaagaacgtgcaggtgttaaatttaatgatgctgatttaattggattgccagtgcgtgtggttgttggtaaaaatgcagcagagggtatagtagaagtgaaacgtcgtgatacaggtgaaagtgaagacgtccatgtggataatttaattaattatgtaaacacattgtattctaatatctaattttagagcaggaactaggataatttgttataatatacaaagtaaactgtgcgttaaaaagtataaatatgggagataggtagaaaccggatttttcaaaaggtttcattgtcccagcttgacaattatgactagggtagatgattacttgaattgaagctcatgtataagagtgagactttacatctactgccaattgacaaaaaagtctgagacatctatttgtgtctcagactcttttgttattcatgtaaagtaatatcatagtgcgacaagttgaactaatagaaatttttagatattccgttatagtatagaatatgtaaattcatacatacaccgtcataaaatataagtatctatatataagaaaagtagtgtaattaatagtaaggtggttatcgtcatggcaatgacaaatgaggaaaaatttaaaatactagctgaccaaatcaaaattactgagcatttagattcagaaatattggaaaatagtgaattaacacgtgttgatgtcaaaacatcagatcgaacttgggtatttcaaattacattcccaaattttttaacaattgaaaattatttgctttttacaggtgcaatcattgaagaatttaaaacgattgcagatgtaaaatgtaatttcacggtaaaagataaaacaaatcaagatgaatttgcaataaaatattttagccactgtattgatcaaacaaaattatcacccaaagtaaaaggacaattaaaacaaaaacgcttaattatgtcaggtgatgtattaaaagtcatgtgccaaaacgatgttgaacgagatcactttgataaagcgtgtaatggtagtttgattgcagcataccaacagtgtgggtttaatataagtaaagtcgttttcgaaacagatagtgcagttaacgatggggatttagcgtcattagaagcacatattcaagaagaagatgagaaaagtgcgcgtgaagcaacagaaaaattagagaaaatgaaggctgaaaaagcaaaacaacaggacaataacgaaagtgatgtttcaaaatgtcaaattggtaaaccaatccaagttgaaaatgtacgtcaaattgactcaattatcgaagaagaatttaaaactgctgtagaaggtgttattttcgatatcaatttaaaagaattgaagagtgggcgtcatattgtagaattaaaagtaacagattatacagattctcttgtcttgaaaatgttcacacgtaaaaataaagatgatttagcgcattttaaagctttaagtgtaggtaaatgggttcgtgcacaagggcgtattgaggaagatacatttgtacgtgacctagttatgatgatgtcagatatcgaagaaataaaaaaagctacaaaacaagataaagctgaagacaaacgtgttgaattccatttacatacgtcaatgagtcaaatggatggtattccaaacatatcagattatgtagatcaagctgcgaaatggggacataaagccattgcggtaacagaccataatgttgtgcaagcattcccagatgcacatagtgctgccgaaaaaaatggaattaaaatgatttatggcatggaaggtatgctggtagatgatggtgtaccaatcgcatataaaccaaaagattgtgacctaaaaacagctacttatgtagtatttgacgttgagacaacgggactttcaaatcaatacgataaaattattgaacttgcagctgttaaagtaaaagacggcgaaattattgataaatttgaacgattcagtaatcctcatgaacgattgtcagaaacaattaaaaacttaacgcatatttcagatgacatgttagtagatgcccctgaaatagaagaagtgcttactgagtttaaatcatgggtaggcgacgccatttttgtagcgcataatgcatcatttgatatgggcttcatcgatacaggttatgaacacgttggcattggtgcttccacgaacggcgtcattgatacattagaattatctagaacaattaatacagaatatggtaagcatggcttaaatttcttagctaaaaaatacggggttgaattaacgcaacaccatagagcgatatatgatacagaagcaacggcttatatgttcataaaaatgcttaagcagctagaagcgcttggtgttcacaaccatcaagatatcaatacgtcattgtcaaatgaagatgcgtataagcgtgcacgaccaaatcatgtaacactcattgtgcagaaccaagatggtttgaaaaatctatttaaaattgtgagtgcatctcttgttcaatattattaccgtacaccaagaattccacgttccttgttggatgagtatagagaaggaatacttgtaggctctgcgtgtgatgagggcgaagtatttacagcagttatgcaaaaagaccagtctcaagtagagcgaattgccaaatattacgattttattgaggttcaaccgccagcactttatcaagatctaattgatagagagctagtaagagataatgaaactttacatgaaatttataatcgtttaattcgagcgggggatgtaaataatattccagtgattgcaacaggtaatgcacattatttaaatgaacatgatgcgattgctcgtaaaatattaattgccgctcaaccgggtaatccattaaatcgctctactttaccaaaagcgcattttagaacaacggatgaaatgttagatgaattacactttttaggtgaggaaaaagcatatgaacttgtagttcagaatacgaatgatttagcagataaaatagaacgtgtcgtaccaattaaagatgaactattcacaccgagaatggaaggtgcgaatgaagaaatacgtgaaatgagttacgataatgcaaaagcactttacggcgatgatttaccacagattgtcattgatcgtttagagaaagaattggaaagtattataggtaatggtttctcagtaatatatttaatttctcaaagattagttaaaaaatcactgaatgatggttacttagtaggttcacgtggttctgttggttcgagctttgtggcaacaatgactgaaattacagaagtgaatcccctaccaccacattatatttgtccagagtgtaagcaaagtgagttctttgatgatggttctgttggttcaggattcgatttaccagacaagaaatgtgaatcgtgcggttgtgatttgattaaagaaggccaggatattccattcgaaactttcttaggatttaaaggggataaagtacctgatattgacttgaactttagtggtgaatatcaacctgaagcgcataactatactaaagagctatttggtgaagataaagtatttcgtgcgggaacgatcggtacggttgcagaaaaaactgcttttggttttgtgaagggatatttaaacgatcaaggtattcataaacgaggagcagaaatagacagacttgtaaaaggttgtactggtgttaaacgtacgactggacaacatccaggtggtattattgttgttcccgattatatggatatttacgattttacacctgttcaattcccagcagatgatcaaggttcttcttggatgacaacgcactttgatttccattccattcatgataatgtgttgaaattggatatactgggtcacgatgatcctactatgatacgtatgttgcaagatttgtcaggtattgatccaaaaacgattccagtagatgataaggagacgatgggcatttttagttcgccagagcctttaggtgtcacttccgatgaaattttatgtaaaacaggtacatttggtgtaccagaattcggaactggatttgttagacaaatgttagaagatacgaaaccaacaacattttctgaattagttagaatttcagggctatctcatggtacggatgtatggttaggtaatgcacaggatttaatacgctctggtaaatgcgatttagcaagtgtaatttgttgtcgtgatgatatcatggtctacttgatgtataacggtttggaaccttcattagcctttaaaacaatggaatttgttcgtaagggtaaaggtttaactgatgatatggtagaagcgatggttgataatgaagtgccagattggtacttagactcatgtagaaagattaaatacatgttccctaaagcccacgcagcagcttatgtactaatggctgtacgtattgcttatttcaaagtgcactatccattatattactatgctagttactttactgtacgtgcttcagactttgatttaatctcaatgattaaagataaagaaagtatacgtaacacggtaaatgatatgtattcacgttatatggatttagcaaaaaaagaaaaagatacgttaacggtgcttgagattatgaacgagatggcacaacgtggctaccgaatgcaaccaatcagtttagagaagagcaaagcatttgaattcataatcgaaggggatactttaattcctccatttattgctgtaccaggtttaggtgaaaatgttgcacaaagaattgtagaagcgcgcgatgaagggcctttcttatctaaagaagatttaaataaaaaagctggtttatctcaaaaagttattgagtatctagatgaattaggttcattacctaatttgccagataaagcacagctttccatttttgatatgtaatccttaaatatgatttactagagactatttagatttcaattaagtgtattattttatagatttagtaaaagtataagaggttgatatattttacttgaatttgacattaattaaatataagtaaatttgagaataacttaagtaagttgtcattgtgccgtttaacaaatatagttatttgtatagaaaatgaacatatggtataataatagtgcttaaaaaattagactcaggcagaaagagtgggcataatacccgctcttttctatttgccaaaaaaggaggtcagcatgagtaaaataactgagcaagttgagactatcattcaacctgtccttaacgacttaaattttgaattagtagaagttgagtttaccaaagaaggaaaagaccattttttaagagtatctatagataaagaaggcggcgttgatttaaacgattgtgcgctagcttctgaaaaaatcagcgaagtcatggacgcggaagatcctatacaagaaatgtattatttagatgtcgcgtcacctggtgctgaaagaccaattaaaaaagaaaaagatttccaaaatgcaataacaaaaccagtatttgtttctttatatgcaccgattgaaggttctaaagaatggttaggtattttacaatctgttgatgaaacaaacattgttatggaagttaaagaaaaggctaaaacaaagcaaattgaaattccaagaaataaaatcgcaaaagcacgccatgctgtaatgatataacgtgatgaggaggatgataagtcgtgtcaagtaatgaattattattagctactgagtacttagaaaaagaaaaaaagattcctagagaagtattaatcgatgccattgaagcagctttaatcactgcttataaaaagaactacgatagcgcgagaactgtacgcgtagaattaaatatggatcaaggtagtttcaaagtaatcgctcgtaaagaagtggttgaagaatcaatggatgatagagaagaaattagtttagatactgcattagtaaaaaatccagcctatgaaattggtgatatttacgaagaagatgtaacgccaagtgactttggtcgtgtaggtgcgcaagcagcgaaacaagctgttatgcaacgtttacgtgatgcagaacgcgaaatcctttacgatgaattcatcgataaagaagatgatattgtaacgggtttaattgatagagtagaccatcgttatgtatatgtgaatttaggccgtactgaagctgtactatctgaagctgaaagaagcccaaatgaaagttatattccgaatgaaagaattagagtgtacgtaaataaggttgaacaaactacaaaaggtccacaaatttatgtttctagaagtcatccaggcttattaaaacgtttatttgaacaagaagtgcctgaaatatttgatggtacagttattgttaaatctgttgcacgtgaagcaggagatcgctctaaaatcagtgtgcattctgataaccctgatattgatgcagttggcgcatgtgttggtgctaaaggtgcacgtgtagaagcggttgtagaagaacttggtggcgaaaaaattgatattgttcaatggaatgaagatcctaaggtatttgttaagaatgcattaagcccttcacaagtgctacaggttatcgtggatgagccaaatcaatcaacagtcgttgttgtccctgactatcaattatcactagcaattggtaaacgtggtcaaaacgcgagattagcagcaaaattaactggttggaagatcgatattaaatcagaaactgatgcgagagcagcaggcgtttatcctgcagaagaagcattaaatgaagaagatgaaatgcaattagatgatgttgtgtcgtctgaaaatattgaagtagaagaagatactactgaatcgcaaccaacagagacagttgaaatagaagacgaagacgcagaaaaataaattggagtggatactttatgaaaaagaaaaaaattccaatgcgtaaatgtatactatcaaatgaaatgcatcctaaaaatgacatgattcgagttgtaatcaataaagatgagcaaatttttgctgatgcgacaggtaaacaacaaggtcgtggtgcctacgtatcaaaggatgttaagctagtagaagaagctcaacaaaaaggtgttttagaaaagtattttaaagctgatgctgatacattagagcctgtgtataaagaaattatacgtcttatataccgtgaagagatacctaaatgaccaaagaacaaatcgtaaattttttaggtttagcaatgcgtgctggaaaagtaaaaacaggtgaatcagttattttaaatgatttgaaaaagaacaaactaaagctcgtaatcattgcaacggatgcttctgataacacaattaaagtgatacagaacaaatgtgaaagttaccatatatcattacgtatatttggaacgagagctgaattaggacaagctttgggtaaagcagaacgtgtaaacattggaatcactgatcaaggctttgctaaaaagttattgtcaatgattgatgaatatcgtaaggagtgactatatgagtaaaaaaagaatttacgaatacgcaaaagatttaaaaattaaaagtaaagaaattattcatgaattgaaaaaaatggacgttgaggtaacgagtcatatgcaaacgttagaagacgaccaaattaaagctttagataaaatttacaaaccagaaaaagcagaacaaagtgagaaatcacaacaaaagaatactcaaaataaacaacaaacaactcacaataaaggtaaccaatcgaataaaggtaaccaaaataataagccgaataataagaaaaataataaaaataacaagaacaacaaaaataataaaaataacaaacaacctaaacaagaagaaccaaaagaaatgccatcaaaaattacctaccaagatggcataacagttggtgaacttgctgaaaaattaaatgttgattcttcaggtattatcaaaaaattattcttattaggtatcatggctaatatcaatcaatcattagatgacgaaacattagaacttattgtagacgattatggtgttgaaattgaaaaagaaatcgtagttgatgaagaagacttggcgatttattttgatgatgaaacagaagatgaaaatgcaatagaacgtccagcagtagttacaatcatggggcatgttgaccatggtaaaacgacgttattagattctattcgtcatacaaaagttacagctggagaagctggtggtatcacacaacatatcggtgcttaccaaattgaaaatgatggcaaaaaaatcactttccttgatacacctggtcacgctgcttttacaacaatgcgtgcacgtggtgctcaagttaccgatattactattttagtagtggcagctgatgatggggtaatgcctcaaacaattgaagcaataaatcatgccaaagaggctgaagtgccaacaattgtagctgtaaacaaaattgataaacctacttcaaatccagaccgtgtgatgcaagaattaactgaatacggtttaattccagaagactggggtggcgatacaatcttcgttccactttcagcattaagtggcgacggtattgaagatttattagaaatgattgtattgacttcagaagtacaagaattaaaagctaatccagagaaaaatgctgtaggtacagtgattgaagctgaattagataagtcacgcggtccgtctgcttcattattagttcaaaatggtacactcaatgtgggtgattcactcgtagttggtaacacgtatggtagaattcgtgcaatggttaatgatttaggccaacgtattaaaacggctggtccttctacaccagttgaaattactggtattaatgatgtgccacaagctggtgacagatttgttgtatttaaagatgaaaaacaagcaagacgtattggtgaagcacgccatgaagctaatgtgatgcaacaacgtcaagaaagtaagagtgtttcattagataatttatttgaacaaatgaaacaaggtgaaatgaaagatcttaatgtcatcatcaaaggtgacgttcaaggttcagttgaagcacttgctgcgtcattgatgaaaatagatgttgaaggcgttaatgtgcgtattatacacacagctgtaggtgctataaatgaatcagacgttactttagctaatgcctctaacggtattattatcggtttcaatgttcgaccagatactggtgcaaaacgtgcggcagataatgaaggcgtagatatgcgtttacaccgtgtcatttacaacgttatagaagaaatagaatcagcaatgaaaggtatgctagatccagaatttgaagaacaagttattgggcaagcagaagttcgtcaaactttcaaagtttctaaagtcggtacaattgcaggtagttatgttattgatggtaaaatcacacgtaatgcaggtgtacgtgtcattagagacggcattgtacaattcgaaggggaactagacacattgaagcgttttaaagatgacgcaaaagaagtagctcaaggttacgaatgtggtatcacaattgaaaagtataatgaccttaaagaaggcgacatcattgaagcgttcgaaatggtagaaattaaaagataaaatttaaattaaaataaagattcaggcatataatcacctcagactaacgataatcattttctttattgaaatcatcataagcacgccaaaagtgagattaaaatctcatttttggcgtgcttttttattatcaatgaagtttctgtataagggcgtaaattgagtcaccatcagtcatcattagggacttttagatttaattaagatatgtttatgaatcgatgagagtatatctgttaacaactaaatagattatatttgataatgatgtaaagctttcgtactctgaagcatcgtataaaagagagtgttgatagtagatgtgaaaaatatcagggatgttgattttatgtattatgttgttatataatatatattccaaaattcgatggcttatcagtgattcgaattttaagtatacgtcgtttatagtttattaaacaattaatatcaaaagatattaaaattaaataattgaaacatacaaatgttatcgcactattttatataattaatagatgttttttataattgtaaattagatataaaaaatattgtaaaattacctttatttatattggctgacactggctgtctatgtgcatgattaaacttagaataaat

SEQ ID NO: 32 - DNA, 43319 bp, Staphylococcus saprophyticus
taggaacgcctatatttgctgtaataagtgcgtttttattaacaatctcagtagtgaataaagggtttaatttagattattttgttaaatcacgttttagtaaaatatttattccttatatcatttggacagtattttacttattatatagagccttttatttacataatcttgaagatgatgggaaattattgaattactttgtgtatggaaaagcaaatttccacttgtattttattttgactgttattcagttttactttttatttccgttattacagaaattcaaaaaaggttggcctattattatagtgtatatattagcgacaatcgctaatatcatttggattagaatggggccagtttcattaggtggcggtggtgtcgaacgttttgtgaatgataaattattcattatgaattggatatcattctttatgttaggtattgtatatgctaaattttacaatgaaattagaatcctcatctttaagcacaaagccatattatctactattataggtatattatttatcgatttcctattgagtattgatttggatcatttacaaagttcaattactgtgtcgaatatgatttatattccatttttcattgtgtttctaaattatttatatgaacatgttaaaaagaatcacaccattttaaaaaccttaaccttaattggtaattattctatgggaatttatttagtgcattacgttgcaattcaattcgtaaaacgtttgcctataattgaagatatcgtgccacaaagtaaatttatgggcgtatttatattaacagtagcagtatctgcattgattgtttatctaataggtaaaatcccctatggtaactatattgttccaattccaaagaaaaaagcaacgcaaaccacagatgtagacaaaaagaaagttactcaaagcaaaaacacacctaattataattcatgagcatattataaaataaagtctgaagcattgatgataaatgtttcaggcttttttatgcgaaaaagggtatgacaatggttttatattattggggatatatttaaactagaattattaagacgtatgaattagggtacatatatgttataaaaatagatatgtgaaatgttaataatgtgatatgatgaggattagtaattaagacgattaaagcattctatgatataattttgtacagtatttttttatctggtagattatatgattataatttttaagaattaagttaaggtatggtgagttatatatgtcgaatgaagacaatgttagacaagaaacaaaaaataaaaaagaaaaattgagacttagttttccagagacccgcttcatgaaatttatgggaggcaaagatttattattcgccttaatcatgctgatactcattggtattgcgatatttatatttgatcaagtatcctatatatttaaaccatttatcattgtatttaatacgattgtagcaccgattattgtatccatcattctatactatttattcaatccattagtcaatttgatggaacgctataatatatcacgtctttggggcgttattattttattcctagttattattggggttatcgcgttagcaattaatttattgataccagtcattggtactcaatttaaaagtttcggtaataattttccgcattatgtagataaagtgaatcaatttattgataatcttactagaaattccttgatttctaacttttatggacaaatacaagaacaattagatgctttagctaacaagctaccatcaatggtttctgattattttaatggtttcggttcaaaagtgaaaaactttgctgaagctatcgtaaatgtaggggtagtcattgccacaacaccatttgtcttattctttatgttaaaagatagccatcatttcaaagaatattctacgaaattaatgccaccaaaatttagaaaagattatcatgatttattagacaaaatgagtgtacaagttggatcttatatccaaggacagattattgtttcattttgtatcggtattttactatttattggttatagtattatcggattagattatagtttaattttagcatctatagctgctgtgacgagtgttgtaccatatttagggcctacaattgcaatttctccagctatcattattgctttaattacttctccaattatgctcttgaaattaatcatagtatggactgcagttcaatttatagaaggtcacttcatatcgcctaatattatgggtaaaacgctgaagattcacccactcacaattatctttatcttattgagtgcaggtaatcttttaggtgttgttggtgtcatcttaggtattccagcctacgctatattaaaagtgttagtctcacatttatattcaatgtataaacgcagatataataaatattatggcgatgatgcaggtgaatatgaaattacaaacgatgaacaaatacgctagaatttacaactgaatacttcattattcatcatacatgtaagagattgataaatgagtctgggacaaaaataggtgtctcggactctttttcatttaggaaatagctaacggatttaaaaatgtaaagtctcacttgtttaaagaaaggatttttcatttttacgggcctaacaattatgttagaagttattattaaaattttatttcttatatattattattgtgctatattttttattgagcttagattattaaaaagtgaagtgaaaacatgtctaaagaaatgagaagtagattattttctattttaaaagttgtgtttgcggtcgccttatttagtatcgtagtgtttactttatataaggaattgtcgcatattaatattaaagaaacgattcagtcgtttggaaaaattaatcgtgtatggttagtcgccttatttgtaattggcggggcatcgattattgtactttcgatgtatgatgtcatattagcgaaatcattaaatttaaaaatttctttattaaaaacgatacgtgttgggtatattgtcaatgcgcttaatgctgtcgtaggttttggtggttttattggcgcaagcgtgcgttttttattttacaaaaatgccaccgatgataaaagagcgttactgcacacgatttctattgtattgatttctatgttaacagggttaagtttattatccattttagtagtcatccatgtatttgatgtatcacatctatttacaccatacccatggattaaatggctaatgtatgttgtagccttgttcttaccggtgtttgtaatttttacgattttacgaccagtacaagaaaatcaaaagttattaggtgtttattgtacgattgtatcaagtattgaatggcttgttgcggcactcgttttatatatggctttaacaatggcaggcgttcatgtaccaatctcaatatttatgggcatatttatcattgcagctttatcaggacttatcagttttatacctggtggatttggtacatttgatttagtagtattacttgggcttaagcatttgaatatagatgaagaatctatagttttagggttattactttatcgttttgcgtattatctatttcctgtgctcgttgctttaattttatctacatttgaatttcgtggtacagctaaacgctactgggaagatgcaagaatacttgttccggtgagagatatgacatcattattatcatcttaccaaaaggatattattgcacgtgcaccctcgttttcaattgctattttattaatgtttacgagtctattatttttcttgaataatctaactattatctacgatggcctatatgatccgaatcactatatctattacattatcgtatcggttcacacatgtgcatgcttattattacttttaaatgtggtaggtgtatatcgcttatctaaacgtgccatcttattttcgattatttctattatattaatttttattgtaacagcctatacgtatgcttcatttatattacttagttggcttgttgtaatgttaattttattgttcattttttacagaagagcacgagttataaaacgtccatttagatatttaaaattatgcttaagttttataatgggtgcgctcgtactttatattaatcatattgttattgcgagtacgttttatacattagacatttatcacattgagatagacacctctattttgagatattatttctggtttactatcttattggtagcggttattgttggtctgattgtttggtggtttgaatatcgttatagaatatctaatacacgagaagatactaaaatatgtgcgtctattgtaaaacaatacggtggtaattatttaagtcatctcatgtatagtggcgataaaaaattttttattaatgaaaatgaagatgcctttataatgtatcgttatcaacgcaatgcatacattgtacttggagatcctataggtaatccccaatctttctatagtttactagagtctttctatcaagaagcagagtatcttggctatgatattattttttatcaagtaacggatagaaatatgtctctttatcacagtttcggtaatcaattctttaaattaggtgaagaagcggttatcgatttgaatgaatttaagatttctggtaagaaaaaacgtggtttacgggcaactttaaataagttagatgatttaaaatatacttttgaagttatagaacctccatttacgcaagctttaattacggatttgaaaacaattagtgatgaatggctcgccgataaaaaagaaatgcatttttcagtaggtagtttcaatgaatcgtacttatcaaaagcacccattgcaattataaaagacagtgatggacttattattgcattttgtacgttgatgccaacttattataaaggaacgatttctgttgatctcatacgttggaaaccagattgcacattgccattaatggatggtttatatttaaatatgttgttatggtcacaaaaacaaaattatcaacattttaatatgggaatggctacgttatcgaatgtaggtcaattaccttattcattttatggagaacgtattgcaggccgtgttttcgaacattttaatggtttatatagatttcaaggtttgagaaaatataaagagaaatttaatccaaattgggaaccaaggtttcttgtttatagaaaacgtcattccttatggcttagtatgataaaagtaatgcgtgtcattagaaaacataaataatatgaatgacaaaacaccccacatgtgctcagcatgtggggtgtttctaggagttgatagtgcttaatggtttttgtgtaattaattactggagaagttattaattacattaataaactaactataaaatttctaaatatcattttgactctaactatgaatttaacattaccttgttacttaaggtataaccataatatatcaccaatagaaaacgctttcaacaaggtattaccatattatttcttttctttttaacatattatctttatatattctttttaaatattaaaggtattattacactttggatctaatgttatctattcgaaatgatttttattgtagctaaatagctatcctaattatttatgttatatcaataataacaattttaagcattataattatagtgtgaaaaaataattaaataacaagtttatgaaaatagactattaaatagtaaaatcttatgttaatatgaaaacggttacataaaagaggtgaaacatggcaacgattaaagatgtagcgactttagcaggatgttctgtagcaactgtctcaagggcaattaataacaatggttatgttaaggcaaaaacacgacttcatatagaagaagcaattgccgaattaaactaccaaccaaatgaagcagcacgcacattatataaaagaaagtctaaactaataggtttattactgccggatatgagtaatcctttttttacacttatcgctcgtggcgttgaagatgttgctttagcacatggttaccaagtacttattggtaatagtgataatgatataaaaaaagcacaaggctacttagcaacattcgtatcacacaattgtacaggcatgatatctacagcatttaatgaaaatattatcgagaacacactgactgatcatcacattccatttgtttttatagatcgtattaataatgagcataatgggatttcaacgaatcactttaaaggtggtcaacttcaggcagaggtagtacgaaaaggtaagggtaaaaacgttttaatcgtacatgaaaatttattaatcgatgcatttcatcaacgcgtccaaggtattaagtacatattagatcaacagcgtattgattataaaatgttagaagcaacgttattagataatgataaaaaatttattgacttaattaaggaacttagcatcgacagtattatttgtagtaatgatttattagcgataaacgttttaggcattgtacaaagatatcattttaaagttccagcagaaatacaaattattggatatgataatattccattttcagaaatgacctatccacaaattactactatagatcaatcagcatatcatttaggtgaaattgccgtttcccaactattaggtttgaatacggataatttaacaaacaaccataagcaattggcacttacagttaaacatagaggaagtacacgtaattaaatgacattatgtaacgggttacatataaggaggtaaattttatgtataaaacagggatattaaatagcgatatttcaaaattacttagtgatttaggtcatacagatgaaattatgattgctgattgtggtcttccaattccaaacggtgttaaaaaaatagatttagcattggattttggtaaaccatcattcttagatgtatttcatattgtgaaatcgcatatggccatcgaaaaaatgactttagcaagtgaaatgaaaactgaaaatgaatcactttataacgttttaaaagaagaagaaattaaatttactactgaatcccatgaattattaaagcaacatagtaagcatgtaaaagctatcattcgtacgggtgaagcgaaaccttatgcgaatgtcatattagctagtgacgttttattttaaaggagggatcaatggatgattgaaatgaagaatatttataaatcttttggtcagaatgatgttcttagaggtgtggattttgatattgcggatgccgaagttcatgcattgatgggggagaatggtgccggcaaaagtacgttaatgaaaattttaaccggcgtttatgaagcaaatggtggacaaattttagaagatggtaaaccacttcaatttaaaaatacaaaagacgctgagcaacatggtgtgtcatttattcaacaagaattaaatatttggcctaatttaacggttttagaaaacctatttttaggtaaagaaccaacgaagtttttagggataattaatcataaagtgatgagaaaacaagcgttggaaatatttaacaatttaaatatacagcttgatttgaatcaaatggctgggacgttatcagtaggtatgcaacaaatgttagaaattagtaaagcattaatgcaagattctaaagtcattattatggacgaaccaacggcagctttaacgactagtgagattgaagtgttattcacacaaattaataaattaaaatctaaaggtgtttcatttatttatatttcacatagaatggaagaaatttttaatattgcagaccgtattacagtgatgagagacggccggtctatattaacttcgaacacgcaagagacctctaatgcaaaaattgtaaaagccatgattggtagagatttggataaccagtatccagaaagaaattataagcaagatgaattagtgctgtcagttaatcagttaagttctacggtatatgacttaaatgatgtacattttgagttacacaagggtgagatttttggattcagtggacttatgggtgctggtagatctgaaatcatgcgcgtgttatttggcctagacaaaggacaaatgcaagtaacacttaatggtaaaaccattcacatgaataatcctaagacggccataaagcacgggttagcgtttattactgaaaatagaaaagaagaaggtttagttctacaagattctattatagaaaatatttcattacctgcattgaaaagtttttcaaagggtggttttttaacaccaacagcgatgaacaattatacagaacagatgattcagcgtttgaatatcaaaggtggaaaagatgatagttgtatggatttatctggaggaaatcaacaaaaggttgttttggctaaatggattgctactgcaccacacgttttgattttagacgaaccaactaggggaattgacgttggcgcaaaacgtgaaatttatcaattaatgaatgaactgacagaacgtggtatgtctatcattatgatttcatcagaattaccagaagtgataggaatgagtgatagagttgccgttgtacatgaaggtaatattgcaggtgttttaaataaaaaagatctaactgaggaacgtattatgacattagctacaggagggaatatcaatgaaacaatctagcttatcattttcatatttagaaaaaattattccatttattggtttaatattattagtcattatcattagtgtattaaatagtgcatttttagaaccatctaatctgtttaacttattgagacaagtttctataaatggattaattgcatttggtatgacatttgtaattttaacgggcggcatagacttatctgttggttctacactagcgttatccagtgcgcttatagctattttaatggtctcaggtgtagattctatgattgcgctattagtaggctgtattttaggtgcgattttaggtgctattaacgggcttttaattacgcttggtaagatggcgccatttatagcgactttggctacaatgactgtctttagaggtttgacactggttattacagatggcaatccaattactaatttaaatggcagctatgcctttcaattatttggacgaggttattttttaggtattccagttccagcagtgacaatgtttattactttcattattttgtatatcattttacataaaacaatatttggtagacaaacttatgctatgggtggtaatgaaaaggcagcttttatctctggtattaaagtgaataaattaaaaatcatgatttatagtttagctggtttaatgtctgcaatggctggtgcgattctcacatctcgtttaaactcagcgcagccaactgcaggtatgtcatatgaattggatgcaatcgctgctgttgtattgggtggtacatctttaacaggtggtaagggacgtatacttggcacattaataggtgtattaattataggtgtgttgaataatggactaaatttattaggggtttcttcattttaccaacaagtagttaaaggagttgtcattattattgcagtactcattgatagaaagaataaataaagtaggaggtttatcatgaaaaaattatttttaagtatgatggcaatgatactgttgttagctggttgttctttagagtctcctctagaaaagcaagatagtggtaaatcagacaagaaaaaatcagatattgtggttggtgtaagtatttctacattgaataacccattttttgtgaaaattaaagatggtatatcagctgaggcgaagaaacaaggtattaaggttaaatttgcagatgctcaagacgatgcagcaaagcaatctaatgatattgatgatttaatacagcaaaatgtagattatcttatcgtgaatccaactgactcagatgctatttcgggtagtgttcaaattgcgaatgatcaaaatattcctgttatcacattagatagagaggttgctaaaggaaaagttgcttcgtttattgcttcagataatgttaaaggtggagaaatgggcggcaagctcattgttgataaatttggtaaaggtacaaaagtagtagagcttgaaggtataccaggtgctagtgcaactcgtgagcgtggtaagggattccacaacgttgctgatgatgagttagatgtcgtatcaaaacaaagtgccaaatttaatagaacagaaggtctaaatgtaacgcaaaatatgattcaagcgcatcctgatattaaagcaatatttgcacaaaatgacgaaatggctttaggggctgttgaagcggttggtaataaagatattaaagttattggatttgatggtaatgaagatgcaataaaatctgttgaaaacaacaaactatttgcaacagtcgcacaacaacccaatttaatgggagaagaaagtattaaaacagttatggatttatttaatggtaaaaaagttcaagaaaaaaataagatacctttagaaatgaaaaaacaaaaataggatttatgagaaaaagccggatacagtgatcatcgtactgtttccggctttttgtttatttatctgtctgttgcttataattttgacggtcttgttgttctttggcgtaacgttctggattttttttataaaaatcttgatgttctggctctgcttcataaaatgtagcagcaggtaatacttgagttgcaatagctttatctttatcgattgtttctttgagttgttcaatatattcttcggcaacatttttttggtcttcattggtatagaagatagcagttttgtactgtgcacctctatcttgaaattgtccgccttcatctgatgggtctattactgaaaagaaaatttctaataatttattgtatgaaaacagtgctacatcatattcgatttcaacagtttccaaatgtccagtgttgcctgtcttaacttgctcatatgaaggattatccacatgtcctcccatatagccagaggttacgctttcaataccttcaaatgtgtcgaagggtttaaccatacaccaaaagcaacctcctgcgaagtaggctttgtttatattcatgcttaacatcctttccgtattagaccttagtaccatatattaagatattacttgatttttatacactttttatataactttaatatatgttaattatagtacatagaagtgcaattttgaagatataaggttgatactaatgaatgaagacaaactaagaagtagtaagaacacacaaggcaatactaatcctccgccaatgcgtagggggaaaaagaagcggtttaggaaactaccatttattattttgattggtattattattttagcaattatcataggctattccgtacatggttataattccggcataaaatatgctaaagatcatggtaaaacgttgaaacagcataaatttaatggtgccgtaaagaatgatggtaaaattacggttatggtactaggtgcggataaagaacaaggcggaatttctagaacggattctattatgatagcgcaatacgattatattcacaaaaagatgaaaatgatgtctgtgatgcgtgacatttatgctgatattcctggaaacggacagcataaaataaattctgcatattctatcggtggaccagaattgttaagacaaacattgaagaaaaatcttggcattgatcctgaatattatgcgattttagattttactggatttgaaaaaatgatagatgaactagaacctaatggtgtgccaattgatgttgagaaagatatgtcaaaaaatattggcgtgtcattgaaaaaaggacatcatcgtctgaatggtaaagaattattaggttatgctagatttagacatgatccagaaggcgattttggtcgtgtacgtagacaacagcaagtaatgcagtctcttaagcaagaactcgcaagtttggatacattaccgaagttaccaaaagttgctggtattttaagaggttatttaaatacgaatatgccagattctgtattaatacaatcaggtttaaactttggtatccgtggtgataagaaagtcgtctctgttacattacctattaaaggtacttatcaggatattcaaacaccaatggacggtagtgctttagaaattgataaagccaaaaataaagctgaagttaaaaaattccttgaagaagattaagatagtttcgacataaataataataagcgtacgttaccctatggatagcgtacgctttttttatatagaaaatttttcatttgtaatcaggtgggttaggtaatgaacttgattacatttttgatcattaattctgtttttattgatcagattttctcacaccagctacgccatagtgagatgctttcatttcttctatgacaatttgtatcgcctctttattagcacctgttgttttttctacagcatttgtaacctcagttaccaaatttttaagttgttcatctgaacgtccttctaataactttacatttacgattggcatgtgtaattcctcctttaataatttaaagatattatagcatgaaaattgagaaaattataaatatatcaaattggaacatttgttcttatcgctattgaaatagaacatttgttcgtatataataaaattaattgagggaggcatgagatatgtatgattataatctggtggaagagagagatgtattgtgtatagatcaaaaaagtttttttgctagcgtttcttgcatacaaaaaggattagacccaatgaaagaaaaattagctgttgttgctgatactaaaagacaaggttcagttgtgttagcagcaacgggacctttgaaagcattaggtgtaaaaacgggatctagattatttgaaataccacatagaaatgacatatatattattaatccaagtatgagaaagtatttagaagtttctgtagcaatatcaaaaattgcattgcgctatattgctcctgaagatttacatcagtatagtgtagatgagttttttatggatgtgaccaatagttatcataggtttagtagtacggttcaatctttttgtcaaaaattgcaatttgaaatcaaagaagaaacaggcatcaattgttctataggtataggatctaatatgttattgagtaagattgccatggatgtagaagcaaagcatactaaaagtctaattgcagaatggcgttatcaagatgttccgaaaaaactttggccaatccaaccattaagagaattttggggaattagtagaaaaattgaagcgaaattgaataaaagaggtatttttacgataggcgatttagcacattatcctcaccaatacttaaaaagagatttaggtgttataggtgtggatttacatttacatgcgaatggtatcgatcaaagtagagtgagagataaatatagagtaatgaatccatctatttgtaagagtcagatactgatgcgtgattatcgttatgaagaatctaaagtagtgatgcgagaattaattgaagatgtggcgagtcgtgttagagggcgaaatcaattggcaagaacaattcatttttcatttggttatagtgataagggtggcataaataaacagtatacattagaagaaccgacgaatttagaagacagtatttttaaagttgtcgaatattttgctgataaattatgtgatcgtaccgcattgattcgtacagtaagtatttcattaacacagtttatagaagagacagatagacaattgaatttgtttatagatgaatatgaaagaaagagaaatgaaaaattagctaaaacgattgatgcattgcatcgcaaatttggacgaggtattgtatctaaagctgcttcttacactgaagcaggaacaaaacacgggagattaggtcttatggctggccataaaatgtaaagtcccaaatagcattctactgggcttatacatggaaggtagctcaggtaaatctaaaaaatactgcttcatccattaaacaagtaggacaacgaaaatcaaatttaccaaaaatgatttcgttgtccgactcataaaatttcatatattaatcaaaataagtatcaaaatcactaagcgcatctgcaccatctttgcgatcttgtgggtttttaaaactaactcgaagtgcaccataaatatcttcacgaacttctaatattctcaagttgcttatagaaatattatgtaaacttaggatgtttgtaactttgcttatcatacccggtttatccggaatgtctacatatagatcatactccacagatagtgcaccttgttgtttaaggggtaactgatcacgataaactttagcatcgttgaaaaaatcataaagttcatcaggattattgtgttcgattatattaatgacatcagacatttgatttttccattcttttaaaatgcgcaatattgtatttttattttcaatagtaatatcacgccacataataggattactacttgcgattctagtaatatctctaaaaccaccagctgcaagcgtcttaacaagtgaagaatcttcgacatgttgcgcattcaaatgaacgagacttgaagcaatgatatgagggacgtgactcacaataccagtgacaaaatcatgttcttccgctgttgtagaaataaatttagcactcgttgtttgtaataagtgctgtatttcctcaaaagcagcatcattatcagtttcgttatgaactaaaatataaaaagcattttcaaataaatgtttttttgcatttaatactccagatttatggcttcctgccataggatggccaccaaccaaatgaatatcatgatttaaaagaaactgctcatattgttgaatcgttgactttgtacttccagtatctgtaataattacatgtttttttagttgatagtttggtaaatcttgtaagtatttaacagtctgctgtaccggtgttgcataaataataatgtcagcattttcaacactagttttatagtcagttgattgataatctatgataccaatagacaatgctttatctaattgtgaagtatccgcatcaaaggcggttatttcgatatcatcatgataatatcttaagttactcgctaagcttccgccaataaggcctaagccaacgaaaagaatttgtttcatttaacaaaccacctctatcaaaattttcagaatagtaacattgtatagtagcgtatacaatttcgcaatatgaattaaaagtagaagtaaaagtgaataactttatagaaagtatgctaaagtaaacatattatgcttactaaaataaacatagcatggattaggagagaaggcattggaaataaatcatattttaatagccggtgactataaatcaattttccaaaaatatttaaaggatttaaagaattaccaattaagttttgagtcagttgaatcaattacaaatgaagatttagattgggcagatgcttatgtgggatttgagccatgtgagcaatttaaaccatcacaggtgaaatgggtgcatacgtttaatgcaggcatcaataactatttagctatagacggctggcaagcatcgcaaactttactcacaagaacaattagtgattttggagaaaaaatgagcgaatattgtttgagctatatattagctgatttacaacatcataagttatttgaagaacagcaagatgaaaacatttggctcaaacaatcaccacaagcattgcgagatcaaactataactatttttggtactggagaaactggacaaaccattgctaagatattttcattattaggtatgactgtctacggtatttctaatagtgggaaagcaaaagcctattttaaaaaagtgcttcctatccataaagctaagacattagttcagcaagcagattatattatcagtactttgccactaacaacaaaaacagaaaaattattcaatcaaactatgtttgaagcatttgatcaagcttattttatcaatgttggtaggggacaagtggtggatcaagaaagtttaaaatcagctttaaacaaaggtaacgtcagacatgcggtattagatgtttttgagtcagaaccattacacaaaaactctgaattatggcaaagaaatgatatcactatcacacctcatatttctgcattaaccgatttgaatgaagctgtcacatgtttttatcatactttgaaaaatatagagcatggtgaaatacttgaaaatcaagtggatttaaaaagaggctattaacaacgaacaagctgtacatataacaaaagcaatcataaagctgtttctaaaagtaaaataaagctactatcatcatctctatgtaaaggatagtagctttataattaaaatttaagtatgtttggcaacatcaatttagcatatagttttaaaatgttattgtatatttttagatttagaatttatatttaaccttttttctaatacagatataaaaataaaattaactaaaacaactaaaaaaatagtgccaatatttccaagtaaatgaggcaaatcaaaatatagtattataatcatcaataggatatttgtataaacataaatataaacatgagtcattatttttcgtttaagtttatttgatgctgagccgaagaatttgagaaggcttaataaacctaaaattaataaaaaacttactgcaatcatactagtgaaaacgttatattttgttgagcttgaagtcagaaagatatttaatacatataaaataaaaaagattatagatatcgtatatcttaatctaacttccaattttaaaagtttgtcatttttcataaagttttatacacccctaaagcataatgattatttaatacatattatttagtatttcaaaataatatttaaaaatgttgttgtatgcaatgtaacataaatttttaaattcaactatgtattttaaaagggatatagtattaatggtattatttttaaaatttaaacgttagactatatatataatatatttggagggggattagatgtcagaatcaatttttaatacaatccaagcattgacggcaataaatagtccgtcagggtacgcagaaaaagccattcaatacgtaaaaggtgaagcagaacaattaggctacccaacagaagtgactaacaaaggagcgctattaatcacagcaaaaggtgaaaatgataaagcgcaaaaatgtgttacagcacatgtggatacgcttggcgctatggtcaaagaaattaaggaggatggtcgtttatcactagatttaatcggtgggtttagttataacgcaatagaaggggaatattgtgaaattgaaacttcgttaggacaaatctatacaggaaccatttgtttacatgaaacaagtgtacatgtatatcgcaataatgacgatatctcgagagatattgaacatatggaagtaagaatagatgaaaaagtctcaaccaaagaagaaactcaaagtttaggtatagaggtaggcgattttataagttttgatccaagaacacagattacatcatcaggttttattaaatcacgccatttagatgataaagcaagcgtagccatgattattgaatttttaaagactataaaaaatgaaaatttaactttaccacatacgattcaattctatatatcaaataacgaagaaattggttatggtgctaatgcgtctatatctccaaaaataagtgaatttatagcatttgatatgggagcattaggagatggacaagcatcggatgaatacacagtttctatttgtgcgaaagacgcatctggtccatatcataaagggttacgagagcaattggttgaattatgtaagataaatcaaatatcgtacaaggtagatatttatccatattatagttctgatgcttctgcagcattaaaagcgggtgctgatatcaagcacggtttatttggtgcaggcattgaatcctctcatgcattagaacggacacatatcgattctataaaggcaacgcaagcattgttacaggcttattgtctagcagctatacagagctaaatgtttatactaattgtttaaattattagttgaaaaggagaatttgagtggaacagtcactactttggtcaagaaaattcatacctgtgtatttcatagtagcagcgctacatttcatattttttaagatgtatatccaaacagacaattattctatttatttgatgactattttacttgttggtttaggtattgcttcttgtatatataattatagaaataggtcataatttaaatgaagtaccagctatgttaatggaattagaatctttgatgccataaaaacatagacatattaaaaaaaagagccatttatggctctttttttggtttgaaaaatcataacagtctagtaagtgaattcaacaaagttaatgaacaacttaaacaataaataaatttaaatgaaaaatcagacatcttattgataatcaatatcaattactgcataataaaatgatattgaaagaatatactaaaagggatgatacgatgaaaagattaattgttttatttttaagtttattaattattttgtctgcttgtggtcaaaataaagactcgaataaagaaacaaaaacgtttaaaacgcaatcaggaaagagtattaaaataccaaagcacccaaaaaggatagtaattttaacttcaaatttcggtaattttaaagatttaggcgttacacctgtgggtgttaataatgattttccaaaatcaaaatatatcaatgaaaaaggtgctaaacgtgtaggttcagaagatgttgaaggtgttgcaaaattgaagccagacctaattttgacttatgatgtaaatactaaaataaaaaaatatcaaaaaatcgcacctacaataccaataaaatacaatgattattcatataaagaaatgcatcttgcaatagggaaaatactaaataaagaaaatgaagctaaaaaacaaattaaagatatggagaaacaacttcaatctgatggaaaggtaattaaagataaaataggctcaaataaaacttttaccgtaatggaaatcaaacctaagcaactttcaatttttggtgaaaattttggtagaggcacgccaataatatatcaagaatatcaattaccatttccaaaaggtgtaaagggaatgcttgataaagatggctttaaaacaataccacatgagcaatatagcaaatatgctgctgattatatattaattccgactgaaaaaggtaaccctatcaacaatgaatttacagaatcatcgctttggaaaaatcagccagcttataaaaataagcatatatattattatcctaaaaatgaggctacctattctgatccttcgtcgcttaagaaactttcaaattatttcaaggatagattgctagagcaaaaataagcatatgatgatattgaagtgacatctttgattatggaatataaaattgtactaatcaaagatgtctatatattacttattaaagaaagataatctcaatggccaaaatgatttaaataacgcgtagggtggtttttaaactgaagaaaacgctgctttattagcttttttaataataatgagccgtttataacaatttaagggtaactgttggcatctcgatgtatataccattaaaatagaaattaacgactaactataaaaaaaagcaatcaaatgtaatatgggagtataaaatcatgaaaaaaccgagtttaagaacgatattgttaacgatattttggatattagttttactatatgcgatgtatgtaacatttgctgaccataaatttcaatatcatccaattatctttttattcttatttgccataggtgcaaatttaatcaaaaaagtcgctccaaaagataattatgaaaaatatcaaaataataaagacaagctagaataggcttatctaatatggctttgtaatataatcgatgtatttttcaatagcacggaaagtataaaaatgaaattaatgattgacaaattgattttatcctagtaggattctaggtaattactttttgcaacgaaagttgccatttgaaagataacgtagcaaatatgtcatgtagcaaaaagaaagctaatggttgatgaaaattagcactgcatatattgtgaattgggcttttaaatgtactaaattaatagcaatgaaagtgaacaatgaatttgttaactaaggtggcaccacggtaacgcgtccttacagtatgtatgcgttaatgtggtgtttttttatattaaatttgaactgaattagaaaacaaaatgaagtaagttatggcagggtagttacagaaagttagtggttgatgcaaactaacacccacatatactgaaattgggttttgttggattaaaacgaataaaacaaagagcgagtagatgattttaaattaattgtttatctactaattttaggtggtaccgcgcgtcagcgtccttaacatagtttaagggcgctgtttttttataaggaggaaagttaaatgaaagtacaataccaaaaattaaatgctgaagttaccccagaagcattagcaagattaagaaaaaataaaatgattttagaaagctcagatcaatcacaattaaaaggacgttattctatagtgatttttgacacttatggagcaattactttggataatgatgaaatgactattcaaacagctactaacaaaacgatagaacagaatcagccttatgaaaaaatgcaagcttttatagatcaatataaaactaatatagaggatgcaatattagaagatttaccttttatttcaggtttcgttggttcgtgtagttttgatttggtaagacatgcatttcctgttttaaaagaaattgaattaacagatcacccacaacacgacgcaaaattatatatggtagaagatgtttatgtttttgatcattacaaagaacatttatacgtcatcgcaacgaatttattttctaatcaaagtgatgaataattgaaagcacgtgtgcaacgtcgtgtagaagaattacaacaaattaatatctatcctttacgaaatgaacaaaaagtaacagaaaaaaacataaaatctaatatggcaacggaacaatttatagcaacagtagaaaaaatgaagcatcttatacaacaaggtgatatgttccaagttgtgccatctatcatatacagctatgaacacaattttggacaacagttacatcaattatcttatcagttgtatcaaaatttaaaacgtcaaaacccaagtccgtatatgtactacttgaacatggatgaacgcattgtcgtcggcagttcacctgagagttttgtaaaagttcaaggtcaaacagtagtgaccaatcctattgctggaacaataaaaagaggaagcactctggaagaagacaatgcaaacgaaacacaattgaaaaacgatcacaaagaattaagtgaacatagcatgttagttgatttaggaagaaatgatattcacagagtaagtgaaacaggtacttctaagatacaaaagttaatggcaattgagcgttatgaacatgttatgcatattgtaagtgaagtaacaggacaacttaagcaagactattctccaatgtctgtgattgcgagcttactacctactggtacagtgtcgggtgctccaaaactaagagccattcaacgtatctatgaagcgcaaccacaaaaacgaggtgtctatagtggcggtataggctacatcaattgtaatcatgatctagatttcgccttggcaatacgtacaatgatgattgatgaaacacatgtaaatgttgaagctggatgtggcgttgtctatgactcaatacctgaaaaagaactagaagaaacaaagttaaaagctaagagtttattggaggtgtcaccatgatattaatcgttgataactatgattcatttacctataacctagtagatatgatagccaaaaataatgaagtgatagtgaaatatcctgatgatccggagatttatcatttagatgtagatggtgtagtcatatcacctgggccagggcacccattagataaagaagatttaatgaaaattataaagcattatgaaaataaaccaatcttaggtgtatgtttaggtgctcaagcattaacatgctatcacggtggagatgttattcaaagtgaattcatcatgcatggtaaaacggatcaaatgagaatcataaaagatacaaagttgtacagaaatattccagaatattctgaaataatgaggtatcattcactgattagtaattcaaaaacaatacctgaagcatttattataacagcagaaacaaaagattgtattcaatcatttgaacatagtcaattgttacacttcggaattcaatatcatcctgaatcttttgcaacagcggatggtgtacaaatcatcaataattttttgaatatagtaaaggaggacaaaagtaatggaactacaagcacaattaaaacagtataaaccattaaatcagcaacaaatgaatgaatttatagaactacttattgctgatgatatatcaaacgaaataaaagcaaatttattatcatcgttctcagaaaaagagattactcaagaagaattaacatatatttcaaaaagtttgattcattctatgtatcgacagcagccttattatccgaatggtatgtgtgtttgtggtacagggggagataaatcaaatagctttaatatttcaacgacagtttcgtttgtaattgctagcgcaaatatccctgtgattaaacatggcaataagagtgttacctcatcatcaggtagtacagatttgctagaggcaatgggtataaatacaagttctgttgaagcaacaccaagtcaattgaatcaagttggtttagctttcttgagtgcaacagatacgtacccgattatgaaaagcattcaacctattagaaaaatgatgactaacccaacaatttttaatataactggtccgattattaatccatttaaattagattatcaagtgatgggtgtatatgaaacatcaaaattagaaaagattgctcaaacacttaaagatttaggccgtaaaaaagcaatcgttgtctatggagccaatggcatggatgaagcaacgctttctggtgataatatgatatacgaagtaaatgaaaacgaagctactaaaaattatactgtaaatccaaaggacgttggtttagcgtatgcaccaaatgaagcgctcattggtggtacaccacttgaaaatttagagattaccaaaaatattttgacgggtgttgatcgaagcgcaaaacgtgatgtagtggtgtttaatgcgggtatcgctttatatgttgctgagaaggtcagttctattaaacaaggtgtaattgaagcacaacgcttaattgataatggcaatgctattgcacaatacaacaaaatgggaggaatgacatatgactatattggatgaaatcgtggattataaaagaaatttaataaaagaaggttactatgaagagaaattaaagacattaaatgaggtagacattacgcataaatcttcgtttaagtcgcaattagatgagtctaaccaattagcagtaatcgcagagattaaatctaaaagtccaacattagatcaattaccaaatagagatttagcacaacaagttaaggattacgaagctaacggtgcaaatgcagtctcaattctcacagatgagcattactttggaggtagctatgaaagattgcaagatttaacattacaaacgactttaccggtactatgtaaggactttgttgtcgataaaattcaaattgatgtagcaaaaaaagccggagcatcaatcacattgttaatcgttaatgtattaacagatcaacaaatgaaagatttatatcaatatgcgacatcactaaatttagaagtactagtagaagtacatgataaagaagaattagaaagggcctacaaattaaaaccacaaattattggtgtaaacaatagagatttgaaacgatttgtcacagatgtgctgcatacaaatgaaatattagaaaacaaaaaagagggctactattatatttcggaaagtggtattcgggatgaacaggatgtagcgaatgtggttgagtcaggtattgatggtctgttaataggtgagtcgttaatgaaatgtgaagatttaagtcaatttttaccaggattaaaattaactaaggtgacaaagtgaaaataaaattttgtggatttcgtacgttagaagatgttgaaaaggcaaaagcattgaatatcgacgctatgggctttatatattttactgaaagtaagcgatttgttgatattcaaacgattaaacaatttacagatattataccaaatgataaggaaaaagtgattattctagtaaatcctgaacgcgctacaatagatagcattattaatcatacaggtattacaacaatacaacttcatggaaacgaacctataagtacggtgcaatatattagacaacaaaatagtaacttaaaaattattaaagcattacctgcagtaaatcaacaaacattattaacatcaatagattattacaagcattcagttgaccaatttattattgatacaccatcacaatcctatggtggtactggcaaaacgtatgattggaaaattttagataccatacatgatgttgattatttaattgcaggtggcattaattatgaaaatatacaaaagatagaaaacttatcacttcatcatactggttatgatattgcaagtggcatagaaacgaatcataaaaaagacttaaataaaatgttagaaattataaaacttttaaaaggagctcaataaactatggttgaaaatatacaaacagaagcagatgcatttggttttttcggtaattatggtggacaatatgtaccagaaacattaatgcccgcaatacaagaattgaaacaagcttatcaggacgctaaaaatgatcctcaatttcagatagaacttgatgattacttaaaagattacgtaggtcgtgaaacaccgctaacatatgctaagtcttattcggaattacttggtggtgcaaaaatctatttgaaacgtgaggatttaaaccatacgggtgcacataaaattaataatgcacttggtcaagcactgttagctaaacgcatgggaaaaaataaattagtagccgaaactggagcggggcaacatggtgttgctagtgcaactgtagctgccttatttgatatggaactcgttgtgtttatgggtgaagaagatatcaaaagacaatcattaaacgtgtttagaatggaactattaggcgcaaaagtggaatcagtcactgaaggacaaggcacattatctgatgcagtcaataaagcattacagtactgggtaagccatgttgatgatacgcattatttgctaggctctgcactgggacctgatccttttcctactattgtaagagactttcaaaaaattattggtcaagaaattaaagcacaagttcatgaaaaagaaggtcaattaccagatgctattgtcgcatgtgtaggcggtggttctaatgccatcgggacgttttatccatttgtaaaggatgatgttaagctttacggtgttgaggcagcgggcgacgggatagattcagataaacacgcgcttgctataaataaaggtaaagaaggcgtgttacatggtactaaaatgtatttaattcaagatgatgatggtcaaatacaattagcacactcaatatctgcaggattggattatcctggcgttggtccagagcattcatattatcatgacattggaagagtgaaatatgctactgcaagtgacaaacaagcaatggatgctttagtgcgatttactaaagcggaaggtatcataccagctatcgaaagtgcacatgccttaagttatgtagaaacattggcacctacgatgcgtaacgatgaaatacttgtggttacagtatcaggccgcggtgataaagatatggaaacgattagaaattatatgaaacaggagggtgacacgcatgcataaattatttgtaccttatgttatgggcaacagagactttattgaaaatgtaaaaacactaagtgaagcaggtgcagatatagttgaagtgggtgttccattttcagaccctgttgctgatgggccggtaatcatgaatgttggtaataaagcaattcaagaaggcgttaatatacaatatattttcgatcaacttacagaaaatcaagatgagattcaaagtaagtatgtgttaatgacatactacaatatcattaatcattatggtgaatcagcatttttgaatgcttgtgaacaagcaggtgtgtatggtttgatcataccagatttgcctcatgagttggtgcaacaacttaaagcgcgtcatccagaacgcaaaacaaatattatttcattaattgctatgacaacttcaaatactagaagtcatcaaatagccaaggatgcagaaggatttatttatactgtaacgatgaatgcgactacaggcgaagatggtaaatttcatccagagctaaaaaatagaattaaagatataaaagcacatactgaagttcctgtagtagctggatttggtataagaacagcagcacatgtaaaagatattattgaagcttcagatggcgtagtgataggtagtgaaatagtaaaacgctttgaaaatgacgataaacaaactaccattgagtatttaaaaacaataagaaatgtcttgaattaagcaaagattgtcatatatttttatgtgtatgcattaaaaataagggtaatatgatatcagaggaagagttagataaatagtatcgttggtattatttatcgttcatacctttatttttaaaagaggtgacttaatttgagtaaaaaagtattatttataattacgagtagaagtcaatatgatgatggcacgccaactggactatggttagaagaggcgagcgaaccttataatatattaacagaagcaggtattgatgtggatatcgtgtcgattgaaggtggagaaattccattagatccaaattctacacaaaatgatgaattaaatcagtatgctaattttgttgaaaagttaaaacaagtaccaagtattgaaaatattgatgtatcacagtaccatgcagtctatttacctggtggacatggtgccgtatttgattttgcacataaccaacaattagcagatatccttgcagactttaaagaagaaaagaaaattatttcttcagtatgtcacggaccaagtgcatttgtgggtgccaaagataaacaaggcaatttcttagttaaaggtgttacattaacatcatttacagataatgaagaacgtacgatgggcttggaagacaaagttccatttttaactcaaacggaattggaaaatcaaggtgctaagtttgtgacaaaagatgattttacagagcatattgaatctgatgcccaatttatcactggtcaaaatccacaatcaagtgtagcaataggtaaagcaatcagagatgctttataattagaaactttttcttgaaataatataaaaccggagaacgagataagttctccggttttatcatgtatttacaaataaattaagtgaagatgacagtaaatatataattaaggtaataaaaccaaaagttattcataattaaattataaatctaacatgttaaatatgaataaatgcttacgctttgttaaaataaaagtagtgatataattaaataatacataaaacgcagtgtaatcattgcattagaaagattatgtacaggctattgatttagttttataaatgaatattgtataataatctagattgagaattaaactcgaaaatagaactatagataaataggagtatataaaaaatgaaatttacgaatttaactgcaaaagagttcggtgcatttacggataaaatgccgaatagtcattttacgcaaatggttggaaattatgaattgaaaattgcagaaagtacagaaacacacctagtaggtattaagaataatgataatgaagtaattgcagcatgtttacttacagctgttcctgttatgaaattcttcaagtatttttattccaatagaggtccagtcatagattttgaaaataaagaactcgtacattacttctttaacgaattagcaaaatatgtaaaaaaacataatgccttatatttacgagtagatccttatcttgcttatcaatatcgtaatcatgatggtgaagtattagcaaatgcgggtcacgattggatttttgataaaatgaaacaactcggttataagcatgaaggttttttaactggctttgacccaatacttcaaataagattccattctgttttagatttagctggaaaaactgctaaagacgtacttaatggtatggatagtttacgtaaacgaaatactaaaaaagtacagaaaaatggtgtgaaagtaagatttttaggtgaagatgagttgccaatattccgctcattcatggaagatacttctgaaacaaaggattttgacgatagagatgacgatttttattataataggttaagatattataaagatcgtgtgcttgtcccattagcttatatggattttgatgaatatataacagaattaaaggctgaacgcgaagtattaagtaaagatataaataaagcagttaaggatatagaaaaaagaccagaaaataaaaaagcgtataataaaaaagaaaatttagaacaacaactgattgcaaaccaacaaaaaatagatgaagccactgcgttacaagagaagcatggtaacgaattaccgatttctgcagcttactttattattaatccttatgaagtcgtttactatgcaggtggtacatctaatgaatttagacattttgctggtagttatgcaatacaatggaagatgattaattatgctatagatcataatatagatagatataatttttatggtattagtggtcattttactgaagatgcagaagatgcaggtgttgttaaatttaaaaaaggttttaatgcagatgtagtagaatatgttggtgattttattaaaccgattaataagccaatgtacaaaatttatacgacattgaaaaaaattaaggataaaaagaaataaacataaatagaagggaactaagctagaatgaaatttacagagttaactgtcaaagaatatgacaattttgtacagaatccagcattagagagtcattattttcaagtgaaagaaaatattgcgacaagggaagaagatggatttcaagttgtattattaggcttaaaagatgacgataatcaagttattgctgctagtcttttctctaaaattcctacaatgggaagctatgtttattattcaaatcgcggtccagttatggattataatgatttggggttagtagatttctatttacgtgagttagacacttatttgcaacagcataattgtttatatgtcaaaatggatccatattggatttatcaaatatatgataaggatattaatccattacctaatcatgataagaatgatgcactcgttaatttattcaaatctcatcgttatatacatcacggatttacaacatcgtatgatacatctagtcaagttagatggatgggcgtattaaaccttgatggtgaaacaccagcttcattaaaaaaacaatttgatagccaaagaaaacgtaatattaacaaggcaattaattttggcgtgaaggtaaggttactaacaagagatgaatttgatatattcttagaattgtatcgtgaaacagaagaacgtacaggttttgtttctaaaacggatgaatacttttataactttatagataattacggtgataaagcattaatcccattggcctacattgatttggatgaatatattaatcatactcaagaaagcattaatgaaaaagaatcacgccgcgatcaaatgatgcaaaatgagaataaatctgataagcagttgaagaaaattgcagagctagacaaacagattgaacatgataaaaaagaattacttcatgcgagtgagttaagattaactgacggtgctattttaaacttagccgcgggtgtttattttgcaaatgcatatgaagtgaattatttctcaggtggttcatcagaaaaatataatcaatatatgggaccctatatgatgcactggtatatgatgaattattgctttgatcatggctatggtcgttataatttctatggtctatcaggtgactttactgaaaatagcgaagattacggtgtatatcgctttaaacgaggctttaacgtacaaattgaggaattgattggtgatttctataaaccaattaagaaatcgaaatattggttatttaatacgttgaataatgttagaaagaaaattaaaaaataatattaaaaagaaagcatactggttgtaagcgtatatcagtatgctttcttttgtttaggattcgttataaaaggatggctttccaatataacggtaatctagtatgtggcatattctatgaggttgattctagttgttagccacatttttattatagcataaaattatataatatcaatataacaatagcataatgattcaaaaaaagtaaatataaaaaatgtatatatttactcggtgtaagtaatagaataggttaaaaaaaccatgttgtaattcgacaaatcacaacatggtttttatggtttttgatttttattattaagcgccctagttaaaatataaaatttaatttgctatattaaattaattcaaagcatcaataatatatgtgatacctatgataaagaatacaatacacataaatatagcaataattaccgcagcgattaacgggttgaataataaaataataccaaaaacaatttcaattacatttagtaaaattgaaaaagtatggaaagctttattcgacttttcagctggtgttacggtgaatatattgaaaatagcattaataataaaccaaatagcaaataaataaataataaaggttgtactcgttacgacattaaataggattaacaaaccgatgattatattaattataccaagtataatcagtaatttggagcccctttgtgtcgcttttttcattatacgacggatgaaaatttctataaaaccattaataataaataaaagaccaattaaccaagttatagcaaataagttttcttctggaaaactaacgataaatacgccaataactaagaaaataacaccaatgatcaaacttgaccatttaatacctgaagatcgttgcataaatttcactcctaaaatattctctaaacagtatatacccaaaaaaagaaaagcaacactaaaagattttaagattatcatatttatattatgtaaacctataatgtagtttgaacttaataaaaaccattttttaaggattactgagattgtgatagcgattggatatcttatttagtaattattttagtaagcgttaaacataggcgctgagatttgcatttctgagcattttaaaatgatattgtgggtacttgttcatgtgattgcaaataagtatcttaaaatgaaatggccatttgtagtcataacaataagtgttgaaattatctataacaaagaaatgatttacaaatagataacttaagtgagaatcaaatttaaaatcatgtgtattatacgtaacattaaacagaacaattaagtataaaaatcaggtaattcattatagttactaagttaaggttaaatgctatgaaagcataataattttccagtaaaaatatttgctgtattttagtttacataatatatattataggaagttatgtatatcgagatattttccaatttcggaaccctttttcttagtacatgcttgtactatctatataatttctatgctaatatgaatacattacatatgcttcacattgttttagcttgattataatttgctaaatcattattgctcgttgactttctttaatatgataattatacgtatattgataacctcatatgtgttatttcctgtagacttaatcattagacttaatcattgcattggtatgttaattcgaaattgctatgaacttcacacaatcatttagtatttctaaaatctctaattgataatgattttcaattaatatataattaacttttatattaaaggagagattgtatatgaataagtttatatgtattgcattaaccgccctttgctttttatttttaggtgcttgtagtcatacccaaagtaataaagcatctaaagaaacaattaaaattgaaacttcttatgagtttaaagataaaaatcaagatcataataaaggcgaaattaagcatgaagttgtagaggttccggttaatcctaaacgcgttgcagtaatggattacggtgtgttagatgtgatgcaacaattaaaattgcaagaccatatcgttgctattgctaagggccaaggtgcttcatttttaccagacagcctaaaagcatttaaaagcagccaatacaacaatattggcaaccccggtcaacctaattacgatgaattagcaaaatctaaaccagatgttgttgttgcttctttcaggcaagcacatactaaaactttagaagaaatgaaaaaagctgtaccaaatgctaaaattgtttttattagtcctcaaaacgatgattacatagcttcaattaagaaaaatactgaaaatataggtaaaatttttgaaaaacaaaaagaaacaaaggcattaattacagaactggatgataaggttgctgaaactaaaaaaagaattgaaaatgaatctgtattatttctaaatgtagatgataaaggtataaaaacctatggtgctactggtagattcggtggttttttaaatgaagatttaggcattaaacatgctgataaaaaaatgaaaccgaactcaagtggtatacttatttcaaatgaatatttaaatgaaatgaatccagacaaattatttgttattgatcgaactaaacatggaaatgtaaaaagtgaaagtatgccgcaagcgttacagaatgatgttataaaaaattcaaaggcaattaaaaataatggcgttacattatttgaagcaaacagttggtttttcggtgaaggtggtatcaaattaaccatcgaccaacttgaacaaatacagaaagcatttaaataatcttccccactaacctatttagtggcaataataaaaggcattgtaatgtaacccactacaatggcttttattatatctatcttttttctcgatagttctcaatttcatctttaggaataccgccacgtttacgaatttcttttttcgcttttttctcgcgacggcttcgtctccaattgcgtgtgaaataccaaattaagaaactaataattaaactgattacagccataaatgccgcaaatcctaataatggttcatatgtaatatcttcaaaattaggaatcaagaaagcagctattcctaatacgacgattgttaatacagctgggacaaaccatttatttaaagctagattacagaaaatagttactaatatcacagcaactactgaaatccataaataattaggcatatcaaatattgtcatgtgttgcactccttacatatcttttgtttataattttaacttaatgattaagattatactacaatttaccacaatcttattcggactatagtagtatgtagtaatcttttgttttaaagacaaaagattccatacattacatttcatctaattatcttccctgcttcaatgataattaaacttgcaattgtgctttgttatcgtctttcatgtataatcaatatgaaacctaaattacgtgaaggagtgattaaatgactggaacattaccgtttagaagtgatgtccctaaagacgaaacttgggatattactgaattatttagttctgatgaagcattttatcaagtgttagatgaaactttagaagcagccaaagcatttaataaacaatatacagaacgtttgaatcatgctgaaatgattgaagttgcactcaatgcatattctgatatattaattcaattggatagaatggcaaattatgccgaattgaatttaagtgtcgatacggctaatgaacaagcacaaacattgagcgctaaattttcaacttcctatggaaagatagcaagtgaattatcatttgttgtttcagagattatcgaactttcagatacgacattagatgaattaattaaaacatcacaatatccacattttttaacaaaaattaaagctaaaaaagcatataaattatctccagaagttgaaaaagttttagctagtttatcccctacttttgacggtgcttttgatttatatggaacaactaaaatgctagatattgactttgaatcatttgagcacaataatcaaaattatcctttagattatgcaacatttgaaaataaatatgaagataatccggatagaggttttagagaaacaagctttaaatattttagtgatgcgctacgtaaatatcagcatacaacagcagcaacttataatttacaagttcaacaagaaaaaattgaagctgatttaaggggctacgagtcggttattgattacttattacaagaccaagaagttacacgtgatatgtttgatcgacaaattgatgtaattatgagtgatttagcgcctattatgcaaaaatatgctaagttaatcaaacgcgtgcacggtcttgatgttatgggctttgaagatttaaaagtatctattgatccaaattatgaaccagagatttctatagaggactcaaaacaatatatctatggtgcattagatgtacttggacaagattatttgaagatggtcgaagctgcatatgaagaaagatggattgattttgcacaaaacaaaggtaaagatacaggcgcttattgtgcaagtccttatgcttctcattcttatgtatttatttcttggacaggtaaaatgactgaaacatttgtcttagcgcatgagttgggtcatgctggccattttacattagcgcaaaaacaccaaaattatttggaatcagaagcgtcaatgtattttgttgaagcaccttctacaatgaatgagatgttgatgtctaactatttatttaaaaatagtgatgatccgaagtttaaacgttgggtaattggttcaattatttctagaacgtattatcataatatggttacacatttactagaagcagcttatcaaagagaagtttacacaaaagtcgacaatggtgagtcgttaacagcacctgtgttaaatcaaattatgttagatgtttatagtcagttttttggagatagtgtgaaattaactgaaggtacagaattgacttggatgagacaaccacactattatatggggttatattcttatacttattctgcaggattaactattggtacagttatgtcacaacgtattcaaactgaaggtcaacctgccgttgatgcatggttagaaacattaaaagctggtggcagtaaatcaccagttgaattagctgacattgcaggtattgatattcgaacagatgcgccattgaaatcaaccattggttatattggcaagcttgttgacgaattagaaatgctgacagacgaaattgaagcagaacaataaaagaaaagcgcagtgagtagaaaatcaatttcacactcactgcgcttttctttgttatttattgtaagattcgtaacgattaccagtaataaagaaatatatattttcagcaatattcgtaatgtgatctccgatgcgttctaaatgacgtgctgctagatgcgcttgtccggcaacaaaaggatcattatcaatgagataggtagtgttaacaatatttttatatagatcatcaatatccttatcgcgttcaatgatttctttaataagtgtgatatcattgtttctaaccgcatcatttaaatcttttaacattaacaatgctaatttacccattgtgttgagccttgttagcacatatttatctataatctttgctcttaatctaatttcagcaatattagcagcgttatctcctatacgttcaaaatcagaagcaatttttaatgctgccatcatcaatcttaaatcagtagcaattggttgctgtttagtaatcagcataataactttttcattaatttcagtttcaagttcattaatatttttatcttttgcaatagattctcttgcatagtttctatcttcttcacttaacgacattaatgcaaattcaatattatgatatacatgaagaccaagccgacgcagatctttcattaaatcatcgagttggccttcgtatttttgtctgattatagccatagattaatcaaccgaaacgacctgagatataatcttcagtttgtttatcagaaggattagagaagattttatctgtatcatcgtattcgtttacatagccgttaaggaagaatgctgttttatctgatacacgtgctgcttgttgcatgttatgtgtaacgataataattgaatatttttcttttaattcttgtactaattcttcaacttttaatgttgaaattggatctaatgcagatgttggctcatccattaaaataacatctggttcaattgctaatgtacgtgcaatacatacacgttgttgttgaccacctgataagctataggcatttgtatctaagcggtcttttaactcatcccaaattgcagcgccacgtaaagatttttcaacaatttcatctaaaacttttttgtttttaatgccatggatttttggaccatacgtaatattatcgtaaattgatttagggaatggatttggttgttggaataccatacctacatttgttcttaatttttctactgaatgtttgtcgtcaaaaatatttttatcacgatataaaattttacctgcagttttaacagatggtacaagttctaccatacggtttaaagccttgatatatgttgatttaccacaacctgatggtcctataatagcagtgacattattttctagaatgtctaggttaatatttttaagtgcgtgattctcgccataccataagtctaaattttttgtagaatagacaattttcttttcactatctggaattttgttctctttatgattcgattcaattgttgcaataggtttatcattgcgatctgtatgtgcttgtaagtcatcatttttatcaattatttgtttattagccataattaaaactccttttttatataaggctagccagactatagatttaatatccatagtatattcccagtagactagccttggttaaatacactttatatttgagtacgattagaattttttactgtatttgtttcttaagaaaatagcaattgcgttcatcaataataagatgacgagcaatacgataatgcctgctgaagcgacgttttggaattctgcttgtggtaatttcgcccagttgtatatagccattggtaaagcttggaactgatcaaagatacttgatggtaattgtaataatactgtcgggataccaattagaatcaaaggtgccgtttcacctaacgcacgtgatagtgccaagataaatccagttaaaataccagggattgcagctggtaagactacacggcgtattgtttgccatttattaccgcctaatccatatgatgcttctcttactgaattaggtactgctctgattgcttcctgactcgcaacaataattactggtaagataagcagtgacatcgtgagtgcggcagctaatatggaattacctagtgctaatgattcgatacccatacctcttacaaaaattgttaagcctagtaaaccgaatacgactgatggtacaccagctaaattcgagatacttacttttatgaaacttgtgaatgcattatcttttgcatattcttccaaataaattgctgtacctacgcctaaaataatagaaataggaataattgtaatcatcaaccatacagtaccaatcaaggcgcctttgatgccggccattgacggtgttgaagatgagaagctcgtaaagaatgaaggagttaaatgtccaacacctttaattaaagtatcaataattaatgccgctaagacgagtaagccgatcattgtacatgcaaagaatgcccacttattaagtttatttatcgacaatctcccagagagtttcttttcaacggtgttttgatcgacaagtgctttactattgttgttaacttcagccattttaatactcctctctgaaacgtttcgtaatccaatgtgaaattaagttcataattaatgtgaataagaataatgtaaaacctactgcataaatactgtaataaatatctgaaccgaatgtcgcatcacctgttgctacttgcacgatataaccagtcattgtttgaatagatcctgttaaatctaatgatgcagacggtgtactacctgcagctaatgatacaatcatcgtttcaccgattgcacgagaaattgctaatacaattgaagccatgatacctgatgttgcagcaggtaaaacaaccttagttgcaacttcaaatttagtagcgcctaagcctaaagcaccctcgcgcattttatttggtacagatgacatagcatcttcactcatacttgaaattaaaggtataatcatgacacctactacaattccgggactgatagagttgaaactacctagttctggaaagacagaacgtagtataggcgttacgaatgtaagtgcaaagaaaccaaatacaattgttggaatacctgataagatttctagtataggtttgataatgcttcttgctctacttgaagcatattcacttaagtaaagtgcagcacctaaaccaattggtacagctacaatagtcgcgataactgtaattttcaatgtacctagaatcaatgcccaaataccatatttaggtgttgatgaaaatggattccagtccattgttaggaaaaagtctgcaaatgaaactcgtgtaaagaatgtaattgtttcagttaaaagtgtcacgataattccgatagttgctaaaatagaaaaaactgcaatgattcctaaaatgatcggtgcaattttatcgcttgtaccattctttttagcgttgtttttttcaatcatttcacttacggagagattattattcgccatgtgaattccttccttcttgtaaactcccaatcatttaaaaaagttgggtctggaaaaatgacaaagtagcgtacgaatctaactttgccccattccagaatcccaaccctaaacgatcttactataattatttactgtctttgtcgtcgtcttttttactatctttaccaatgatgtcatctaatttagattgttgttctgtgtagtctttcttaggtaatgcaacaaatcctgcatcttcagctgatttacctttgtcttcaagaacaaatttcatgaagtcttggaatcctttgttatcttttaattttttctcgttagtgtagatatacaatggtctactcaatgcatatgaaccatcttggatagttttcttagttggttcagttgttttacctgaatcatctttaactttaacttcttttaatttatctttattttgttcatagaagttataaccgaagtaaccaataccttgtttatttttttgaacagattgtacaattacatttgtatcagcatttttctctgctttgatatcccctttgtccataacttcttcagtgaagaaatcgtaagtaccatgtgattggtcaggtgagtaagctttgatctctttagatggccattttggatttacatctttccaagttttagctttacctgagtaaatttctttaagttgttctttagtaagttcgtcaacgaaatcattatctttattgactgtgattgttacaccgtcttgagcaattttgaattcatcgtatttaatacctttgtcatccaattttttcttttcttcatcttttattggtctagatgcatttgaaaaatcagtgctacctgagatgaatttttcaaatcccccacctgtacctgaagtacctgatgatactgttacatctttattatctttagcaaatttttcgttaagtttttcaatgattggacctactgttgatgagccatcgcctttaacttctccttcgcctttacctgaatcagcgttacctccgccgccacaagcacctaataaaagtgaagcaccgattgctgtagtaccaaataattgccattttttcattgaaacatcctcctaataagtgaataacccaaaagttatatgtatttcttacattctctatactacacaccttttattaaatacaaatatagataatgtaaatgttttgttaaggaattattgttgttgtttacaatatttatatttgtaatgtgaggtgatcactttggttcaaaaatcgctttaaatcaacgttctactcctcttttaatattacagaagttttgaatttgtaatattaaaatacaaaaaaacctaaaaataactacaaaaaagtagtatttttaggttttaatattgattactgtatgatgttttactgaatcaatgaatagcaattgtaataaagtgcttaaataatgaagtgtgatttaaatatcattaattcaatcgttcactgctttataatagaagaaactatttttcgattcttccccaacctttttgggttaaggcaattttaccactttcgatcgtgataattttatttttataaagatggcctattgctctcttgaatgagcctttactcatattaaatatttctttgattgcttctggactagatttgtctgaaaaaggtaactccccatcatattcaactaataagtcaaatatatgttggccatcatcatctaatcgctcatgtgctaagggtaagaatgagccatttagttcccctttttcattatgaccaatgatacgaacgctaacattttcacctaatcgaggttcttctttacgttctgtttcatgaacgaatattttataaccatctttagatagtaagaaactgccaattcttagtaaacgataaggtcttgcttctatcacttggttttgcttctcgtcatcgaacacaggtgtatacatttgttcaacgattgtttctgtcgctaatcgagcaaacatgttgttatctctgtcgatacgtaaagtaacaaatagttcatcaccttgtactggccaaacatctttaactttcggaagatcttcccaaggaatcagtacttctcgtggtaacccaacatctacgtgtgcaccatctctatcagtttttaaaacttttacaaaatcatatttattcgtagtaatgtcaggcatattttgagtagcgaataatgcacctgatctattaggatatacaaaaaagctatattcttcacctatttgtagttcatcttcatcattaatttcagattggtttaatttaacttcttcaccattgggtccttttaatttgtaagtggaaccttctaaacctacaacttcaaggaattctattgaacctacaatatctttttcatcttgggccatacttttctccttcgttcataaaatttattcttctatattataacatgctataggaaaacaagcattagtctagcgcgaaaggtcgaaagtgcaagataagtgtgttataatttgtgcggtagattaacgaaaaggagtaaatgcatgttacaagttactgatgtaagtttacgatttggcgatcgtaagctatttgaagatgtaaatattaaatttacagatggcaattgctatggtttgataggtgcaaatggtgcaggtaaatcaacgttcttgaaaattttatctggagaattagatgcacaaactggtcatgtttcaatggggaaaaatgaacgtttagcagtattaaaacaagatcattttgcatttgaagatgaacgtgttatagatgttgttattaaaggtcacgaacgtttgtatgctgttatgaaagaaaaagatgagatctatatgaaacctgatttcagcgatgaagatggtattagagcagcagaattagaaggcgaatttgcagaaatggatggatggaatgcagaagcagatgctggttccctactatctggtcttggtataaaagcagatttacaagataaaacaatgtcagaattagaaaataatcaaaaagttaaagtcttattggctcaaagtctttttggtaaaccagacgtattgctactagatgagcctaccaatggtttagatatccctgcaattagttggttagaagatttcttaattaattttgaaaatacagttattgtagtttctcatgacagacactttttaaataacgtatgtactcacattgccgatttagattatgggaaaattaaagtttacgttggtaactatgatttttggtatcaatctagtgaattagcaatgaaaatggcacaagatcaaaataagaaaaaagaagaaaaaatcaaagaattacaagatttcgttgcgcgtttaactcttcttctgaatgatacaattcactttctttagcaggttgcatgccgaacatttttaaaattaaacgcgccgaaccattaagggtatatataaatggataaaatattttgtaaaacataatgattggtttggcaatgattaatgtgatttgttcagctttttgaattgcaatggtcttaggtgccatttctccaacaacaacgtgtaagtaagtcgcaataacaaaagcactgattaaggtgaatatatggatcattgtttcagaaagtccaatactactaaataagggatgtaataaaaattcgaaagtggattcaccgaccatacctattcctagagcggtaattgtgatacctaattgacaagcagctaggtattcatctaaatgcgttacgacttttttagcggcaatcgcatttttattatttccactagcaagtgaattgatacgagaa

SEQ ID NO: 33 - DNA, 52215 bp, Staphylococcus saprophyticus
cccccaagagttcacatcgactgggaggtttggcacctcgatgtcggctcatcgcatcctggggctgtagtcggtcccaagggttgggctgttcgcccattaaagcggtacgcgagctgggttcagaacgtcgtgagacagttcggtccctatccgtcgtgggcgtaggaaatttgagaggagctgtccttagtacgagaggaccgggatggacatacctctggtgtaccagttgtcgtgccaacggcatcgctgggtagctatgtatggacgggataagtgctgaaagcatctaagcatgaagcccccctcaagatgagatttcccaacttcggttataagatccctcaaagatgatgaggttaataggttcgaggtggaagcatagcgatatgtgcagctgacgaatactaatcgatcgaagacttaatcaaattttaaatgttttgtttggttgaatcatattttacttactatctagttttgaatgtataatttcatacatttcattgtctggtgacaatggcaaggaggtcacacctgttcccatgccgaacacagaagttaagctccttagcgccgatggtagtcggacttacgttccgcaagagtaggacgttgccaggcaatcagagacccaagcgggtctctttttttatgttaaaaaagcttaacttccagttcgaagaactgaaaaacctaaaataagctattatgagaaagcgtttgaagctgacgaactgagcaaaagacgaagcgagctacaagttaatttcgaataaacaagtgctaaagcacttgcataagtgttactaatttcaataaattgaaaagtaacactttatcgaaatggtgaaaaaaatgttagggaaatttgagcaataaaaaattaataatcatattatagacatagactatttattaatgcgttggtatgatcatttaattttgaaaagggtatccctccaaaacctaaaataaatttcacagatgtttggtttttatcatagtgataaaaaggtagaattttcaattggttgtttgcagcgtttttaaggcactgatccattgaatagccgttttttacagttaaagtgaagtgcatgccagcaagtgcaccatctatttgtaattgatcttcatacggttttagtttttctagaatgaattttagttttctgctatatacttttctcattttgttaagatgcctttcgaaactacctgattccataaaattagctactattttttgtaaatgtgcaggtacggtgttaccttctttgttttttaaatgttcatattgtgctaacaatttttttggtaaaactaaataagctattctacaacttgggaaaagggatttagaaaatgtacttatatagatcactttgtctttggtatctaaactctgtaacgcaggtattggttttccgaagtaacgaaattcggaatcgtagtcatcttcaataatatatctatattcattttgatgtgcccaatttataagttgggttcttttttttaaattcattacgtagcctgtagggaactggtgagacggtgtgacataggcaatattattattggtttggctaaaatagtttaagtcaatccctgttttattaacaggtgtctgaagataagggatgttcttcttatcgagtacttgtttgattggtgggtaacttgggttttcaataataaactgttctttacttaacatatctgtgagcaaattaataagttgttctgttgaggaaccaatgataatttgctctggatgacaagtaacaccacgactgttaaaaaggtaatgagcgatttcttgacgcaatgaccactctcctttgggatttgtgtgttgtagtaaaccgagttgatcatcttcaaagacatcacgtgcatactttctaaattgctgcatgggaaagtattcggcatcaatttcagatagattaaaagcatattgatatgattggtcattatgacgattgttagaagtcatgtctaaagatggtccatttaactgactatgatttcttttaatgataggtaatgcttcaatatctgaaacgaaataaccagaacgtggtttggaatatatatagccttcatctaataaaaattgatacgcgtgctcgattgttgtattacttacggataaatgttggccaagggcacgtttagaaggaaatttatcaccagattgatattgtccttctataatttgttgcttcaagttttcatataattctatatatagatgtcgtttttccataaaatctgaccccttaaattattttggaattgtacctttttaaataccagtttatctcttaaaatgaatttaatcaactaagtaaaggggtaatacagatatgtctaaagttactggatcagagagagttaaaagaggcatggcagaaatgcaaaaaggcggcgtcattatggacgttgtaaatgcagagcaagctaaaattgcggaagaagcaggagcggttgctgtcatggcgttagaacgtgtaccatctgacattagagcagcaggtggcgtagcgcgtatggctaatccaaaaattgtagaggaagtaatgaatgctgtttcaataccagtcatggcgaaaggacgtatcggtcatattacggaggcacgtgtacttgagtctatgggtgtagattatatcgatgagtctgaagtattaacacctgctgatgaagaatatcatttaagaaaagatacatttacagtaccatttgtctgtggatgtcgtaatttaggtgaagcagctcgtcgtattggtgagggtgcagcgatgttacgtacgaaaggtgaacctggtactggtaatattgtggaagcagtaagacatatgagacaagttaattctgaagtaagtcgtttaactgttatgaatgacgatgagattatgacagaagctaaaaatattggtgcgccatatgaagtattaaaaaatattaaagaaaatggtaaattaccagtagttaattttgcagcaggtggtgttgcgacacctcaagatgccgctttaatgatggaattaggcgcagatggtgtgtttgtaggatcaggtatttttaaatctgaagatccagaaaaatttgcaaaagccattgttcaagcaacaacacattatcaagattatgaattaattggtcgtttagcaaaagagctaggtatagcgatgaaaggtttagatatcaatgacctgtctttagaagaacgtatgcaagagcgtggttggtaatatgaaaattggtgtattagcacttcaaggtgcagtcagagagcatatacatcacatagaattaagcggtcacgaaggcgttgcaattaagcgaattgaacaattagaagagattgatggtctgatcttacctggtggagaatccacaacattgcgtagattaatgaatttatatggtttcaaagaagccttacagcaatcaacattaccaatgtttggcacatgtgcaggtcttattgtaatggctaaacagatttctggggaagatggctacttagataaactcgatatcacagttcaaagaaattcatttggacgacaagtagatagttttgaaagtgaattagatgtaaaaggcattgcggaagatatcgaaggcgtatttatcagagcacctcatattgaagcgacacatggtgatgttgacgtacttagtacagttggtgataaaattgttgccgttcaagaaggacgttatttaggtgtatcattccatcctgaattgacagatgattatagagtgacacagtattttattgaagcaattgtcaaaccgacacttactgaaaaagtttaaaaataaatatagtaaaaagcagtcatgtattttaaatatacatgactgcttttatgtttaaattagataaagaatcctgcaatagctgctgaaataaatgaaactaaagttgcaccgaataatagttttaatccgaaacgtgcaaccatgtcacctttttcattgttcaatgatttgatagcgcctgagatgataccgattgaactgaagttcgcaaatgaaacgacgaagactgaaataacacctttcgcatgttcactcatatctttcacttggcttaagctttgcatggcaacgaactcgttagataataattttgtcgccataatagaaccagcttgtacagcatcgttccaaggaacaccaactaagaaggcaaatggtgcaaatacgaaaccgataagtgtttggaagtcccaagtaatgctacctccagaaataccagtgaatattgcactgacaagaccgttaagtaacgcgataattgctatgtaaccaattaacattgctcctacaataactgctactttaaaaccgtctaaaatatactcgcctaacatttcgaagaaagattgcttccctgcttcactttcttgaacgattagtttatcctctttggcatctactttataaggattaatgatagaagcgataatgaaaccgccaaataagttcaatacgactgccgtaacaacgtaacgtggctcgattaaggtgaaataggcaccaataatggaagctgatactgtagacatcgctgaagccgtcaaagtataaaggcgttgtttaggtatatgagctaattctttctttaatgaaataaacacttcagattgtcctaaaatggctgccgcaacagcattgtaagattctaaacgacccataccatttattttagaaatagctaaaccaagtacattaataatccatggtaggattttcgtatattgtaaaataccaattaatgcagaaataaacacgattggtaataatacattaaagaagaatggagggttttttggatctacaaattcaaaaccaccaaagacaaagtttacaccttctgctgcttttgctaataaatagttaaagccatctgatatgccgccaatgactgtgataccgaatttcgttttaagtaaaataaatgcgaatacaagttgtatgactaacaatagtccgatatattgccatcggatgttttttctatctgagctaaatagaaacgctaatgcaagaaacactactatcccaattaaaccgataattatatgcataagttattcatcccttttaaattttcttaacttctataatacaataaaattgatagcacttacatgtttaatttaaaaattttaaaacatattggttgaaaaaggtcaaagttggtcatataatatagtcaaagaaggtcaaaagaggtgataatcatgcacaacatgtccgacatcatagaacaatacattaaaaaattatttgaagacaccaatgaagacgttgttgaaattcaacgaaccaatattgcgcagcgctttgactgtgtgccttctcagcttaattatgtaatcaaaacacgtttcacaaatgaacatggctatgaaattgaaagtaaaagaggtggcggtggttacattcgaatcactaaaattgaaaatagagacgaaacaggttacattaatcacttacttcaattagtagggccatctatttcacagcaacaggcatattacattgtggatggtttgttagagaaatcatatattaatgagcgagaagcaaaaatgatatacgctgtaatagatagagaaacattgaagatggatatactatctagagatattatccgagcaaatataattaaaagattgttacatgttataaattattattaaagcgaggtgttacgtcgtgctatgcgaaaattgtcatttgaatgaagcagaagtgaaattggcagtgaaagggcaagatggtataaatgaaaaatgggtatgttccacgtgtgcacaaggaggtaatccttggacacaaaatcaacaaatccaagcccaagatgatatcgaaggtgcgtttgtagtcaaacaaatcttgcaacatctagctgctaaacatggtatcgattttgatgaaattgcttttaaagaagagaaacgctgtccaacttgccatatgacattaaaagatattgcacatgttggtaaatttggttgtgcagactgctatgcgacatttaaagatgacatagtcgatattgtacgacgcgtacaaggtggtcaaattgagcacattggaaaaacaccgagatcttcacatagaaaattggctttaaaaaaacaaattgaggaaaaatcttcttatctaaatcaattgatagaagagcaaaattttgaagaagctgccgttgttcgtgatgaaatcaaggcattaaaagaggacagcgaggtgaaacatgatgagtaaaaatgatattagtgcatatatgagtgaatggatgagagatagagaagaaagtcccatcgttatgtcatcaaggattcgtttagcacgaaatcttgaaaaccatgtgcacccactcatgtttccgtctgaacaagatggttttagaattattaatgaagtacaagatgcgcttcccgatttagctgtccaacgattagacgcaatggatcagcaaagtaaatataaacttgtcgcgaaacatcttattagtccagaattaatcagacaacctgcatcggcagtgctactgaacgaggatgaatcgttaagcattatggtaaatgaagaagaccatttgcgtattcaagcgatgggaaatgatttatctttatcttcattatacgaaaaagcttcagagattgacgataaactagacagtgaattagatgtaagttttgatgaaactttaggctatttaacaacttgtccaacaaacattggtacaggcatgcgagcaagtgttatgttgcatttaccaggcctaacgattatgaaacgaatgaatcgaattgcacaaacaatcaatcgtttcggttttacaattaggggcatttatggagaaggttcgcaagtttatggtcatatctatcaaatttcaaatcaacttacattaggaaaaactgaagaagacatcattgaaagtttatcagaagtcgttcaacaaattattaatgaagaaatgcagattcgtgaacgcttaaaccgacataactatactgaaacattagatagagtgtatcgttcgttaggtatattaaaatatagtagactgatatctatggaggaagcttcactaagattaagtgaggtcaaactgggtattgatttagaatacattgaattagaagacttcaagtttaatgaactgatggttgcgatacaatcaccatttttattagatgatgaagatgatagaactgttaatgaaaaaagagcagatatattaagagaacatataaattaggaggttacgctatgctatttggaagacttacagaaagagcacaacgtgtattagcacatgctcaagaagaagcaattcgtttaaaccattcaaatataggaacagaacatctacttttaggtttaatgaaagaacctgaaggtattgctgccaaagttttagaaacttttgagattactgaagaaaaagttgttgaagaagtagaaaaattaattggccatggtcaagaacaaatgggtgcattgcactacacacctcgtgcgaaaaaagttatagaattatcaatggatgaagcaagaaaattacatcataactttgttggaacagagcatattttgcttggtctaatcagagaaaatgaaggtgttgcagcacgcgtatttgcaaacttagatttaaatataacaaaagcacgtgcacaagttgttaaagcgttaggtagccctgaaatgagcaacaaaaatgcacaagcaaacaaatcaaataacacaccaacattggatagtcttgcacgtgacttaactgttatcgctaaagacggtacgttagatccagtgattggtagagataaagaaataacaagagtcattgaagtgttaagtcgtcgtactaagaacaaccctgtattaattggtgaaccgggtgttggtaaaacagcaattgcggaaggtttagcacaagcaattgttaataatgaagtacctgaaacattaaaaggaaaacgtgtaatgtcattagatatgggaacagtagtggctggaacgaaatatcgtggtgaatttgaagaacgtttgaaaaaagttatggaagaaatacaccaagcaggtaatgtgatattattcattgatgaattacacacactagttggtgctggtggcgcagaaggtgcgattgatgcttcaaatattcttaaaccagccttagcacgtggcgagctacaatgtatcggtgcgacaacattggatgaatatcgtaaaaatattgaaaaagatgcagcacttgaacgtcgtttccaacctgttcaagtagatgaacctacagtagaagacactattgaaatcttaaaaggtttacgtgatcgctatgaagcacatcaccgtatcaatatttctgatgaagcattggtatcagctgctaaattgagtcatcgctatgtttcagaccgtttcttaccagataaagcgattgatttaattgatgaagctagttcaaaagtaagactgaaaagtcatacaacaccaccaaacttaaaagaaattgaacaacaaattgaacaagtcaaaaatgaaaaagatgctgcagtacatgctcaagaattcgaaaatgcggcaaatcttcgtgataaacaaactaaattagaaaaacaatatgaagaagctaatacgaattggaagaatactcaaaacggtgataacacatcattatctgaagaagatatcggtgaagtcatcgctggttggacaggtattccattgactaagattaatgaaacagaatcagatcgtctgcttaacttagaagatacactacacaatagagtgattggacaaaaagacgcagtgacatccattagtaaagcagtgagacgtgcaagagctggattgaaagatcctaaacgtccaatcggtagctttattttcttaggacctacgggtgtaggtaagactgagctagcgcgtgcgttagcggagtctatgttcggtgaagacgatgctatgatccgcgttgacatgagtgagttcatggaaaaacatgctgtcagccgtttagttggtgctcctccaggctatgtaggacatgacgatggtggacaattaactgaaaaagtaagacgtaaaccttattctgttattttatttgatgaaatcgaaaaagcacatccagatgtatttaacatcttgctacaagtgttagacgatggtcatctaacagataccaaaggtcgtcgtgttgacttccgtaatacggtaattattatgacatcaaatgttggcgcgcaagaattacaagatcaacgttttgctggttttggtggcgctacagaaggtcaagattatgaatcaattcgcaagacaatgatgaaagaattgaaaaatgctttccgtccagagttcttaaaccgtgttgatgatatcattgtattccacaaactttctaaagatgagttgaaacaaattgtgacaatgatggttaacaaacttactaatcgactttctgaacaagatattaatatatcggttacagaagcggctaaagagaaaattgccgaagaaggttacgatccagagtatggtgcaagaccacttattcgtgctattcaaaaaacagttgaagataacttgagtgaattgattttagacggtaaccaaattgaaggtaaagaagttaaaattgatcacgatggtaaagaattcaaatatgatattacggaaagacaagattcagctaaagataaagaaacatctgaatcataatatcaataaagttaatgttaggacctaggacatcatcgcatgtcctaggttctttttctgtataaagggttaaattatcaaattatcattggaaactagcttataacatgatgcattcatactattatttgtaaattcaagctataatatgattggtacttaaacgttagacgtggtattttataaaaatagcttatatcaatatgagaaacgttgaaatgataaataattttaatttaagaaatatacatattaattgagagaattattattgctgagaataaatttgtttttaaatagtcagaggtttaaaatagatttgttcaatgaaaggtggaggtgctgttttggctaaaaagaaagtgatttttgaatgtatggcatgtggttatcagtcaccgaaatggatggggaaatgcccaaactgtggtggttggaatcaaatggaagaaattgtcgaacaaaaggcagccagtccaaaacatggcgtacgcagtcgagacaatgtatctaaagtacaaaaattaaatgaaattaaacatgaaacaacacctagggttaaaacaaattcaaacgaatttaaccgcgtactaggtggaggtattgttaatggttcacttgtcttaattggtggtgatcctggtattgggaaatcgacattactattacaaatttgtgcatcattatcccaatctaaaaacgtattatatatcactggtgaagaatcattgagtcaaacgaaattaagagcggaaagattagatgaggattctagtgaattaaatgtatttgccgaaacagatttagaagtaatccatgaaacggttaaacaaattaaaccagatttacttgttgtggattctatacaaacaatattccaccctgaaatcagctcggcaccaggctcggtttcacaagttagagaaagtacgcagagcttaatgaatatagctaaacagatgaatattgcgacgtttattgtcggacatgtaacaaaagaaggtcaaatcgctgggccgcgtttacttgaacatatggtggacacagtgctttacttcgaaggtgatgaacaccatgcatatcgtattttaagagctgtgaaaaaccgttttggttctacaaatgaaatgggtatctttgagatgaagcaaacaggtttgaaaggcgttaaaaacccttcggaaatgtttcttgaagaacgttcagccaatgtaccaggttccacgattgtttctaccatggaaggtacgagacctttattgattgaagtacaagcattagtgacaccgacaacttttaataatccgagacgtatggcaacgggcatagatcataatcgattgagtttgctcatggccgtattagaaaagaaagaaaattatctccttcagcagcaagatgcttatatcaaagttgcgggtggtgtgagacttactgagccagcagtagatttaggtatcattattgcgacggcttcaagctttaaagatttaacggtggacggcttggactgtttcatcggtgaggtaggtcttactggagaagtcagacgtgtttctcgaatagaacaacgtgtccaagaagctgaaaaattagggttcaaacgtgtgattatccctgagtccaatattgggggatggcaatttcctgaaggtataaaagtaattggggttaaaagtgttcatgaagctttaaaatacgcattaacaaaacataaaaaataattatgctttaataatataaggttgaataattgccggaagaaaggagcgttaacttgtgaacatgataagacttattgttatcttgtgctatatcattttaggtgcaagtataggtgtataccttttgccagaaatctttgatgatatagggctaggtaatatatcattattaactaatacgtattttaatggactactaggtattataattttctttttaatatttggttggtttattaaaaaagcaacacttgctttaaaagaattagaacgaacaattatgcgtcaaagcgcagtagaaattttatttgctacaattggactaatgataggcttactgatttcagttatgatatcttttatattccaaattatcggcaacaacatcatcaatcattttgtaccaatcattattacaattattttaggttatttcggcttccaatttggtttgcgaaaacgtgacgaaatgttgctatttttaccagaaaatatggcgcgttctatgtctatcaatgcacgaaacgcagtgccaaagattatagatacaagtgcaattatagatggccgaattttagacattattgaatgtggatttattgatggtgaaatattaattcctcaaggtgtaatcaacgaacttcaagtcgttgcggacgccaatgatagtgtgaaacgtgagaaaggtcaacgtggtttagatatattaaactctttatatgatacaaatcatccgactagaattattcatccgacgaaaacgcatagcgatattgatgcaatgttaattaaattagcgcaacattatagagcgcacattataacgacagattttaatttaaataaagtatgtcatgtgcaaggaatccaagcacttaatgtgaatgatttatctgaagcaatcaagccctctgtacatcaaggtgaccgattcagtctattacttacaaaaatgggtaaagagtctgggcaagcagttggttatttagacgatggaacgatggttgttgtggataacgctaaaaaacacattggcgaacatatcgatttagaagtgattagcttattacaaacttcatcgggtagaattatttttgcgaaaaaattaaattaaaacgtagggtttcatgtgaaactgtagcaaatgttgttacagtttcgtgtggagccttttttatatttaaaaatatagacaaagtcatggttaatttaagcacagcaatatcatattagcggttaaagtgctacaatagatagcgaaattgtatttctaaaaaaggaatgtcacataatcaattattgtgtgatgcttggagcagactttggtaagagatactttaaaaaataataagctatggtatgattaataagcgataaataataaacttattaatggttgagcggtatttttttataaatgataagtagataaaagatatgcgttcggcttatttattgcgtttgtgaaacgcattttacattaataacgtatgttgaaaataattaatatgataaaacgggagtgaacataatgagtgatcgtgtaagagtgagatacgcaccaagtccaactggatatttgcatatcggtaatgcaagaactgcattatttaactatttatttgctaaacattatgatggtgattttgtaattcgtattgaagatacggatagtaagcgtaatttagttgatggagaatcatcgcaatttgataacttaaaatggttaggtatcgaatgggatgaatctgttgataaagataaaggttatggaccgtatcgtcagtctgaacgtgcagaaatttataatccgctgattcaacaattattggatgaagacaaagcttacaaatgttatatgactgaagacgaattagaagaagagcgtcaacagcaaattgaacgtggtgaaatgccgcgttatggtggtaaacatgcacatttaactgaagaagaacgtcaacaatttgaagcagaaggtcgcaaaccttcaattcgtttccgtgtacctaaagatacgacatattcatttgatgatatggttaaaggtgaaatttcatttgattcaaataacatgggtgactgggtcattgttaaaaaagatggtatcccaacgtataactttgcggtagctatcgatgaccattacatggaaatttcagatgttattcgtggtgatgaccatatttcaaacacaccaaaacaattaatgatttatgaaacatttggttgggaagcaccaagatttgcacatatgtcacttatcgtaaacgaagaacgtaaaaaattaagtaaacgtgacggtcaaatcctacagtttatcgagcaatatcgtgatttaggatatttacctgaagcattatttaactttattacattgttaggttggtcaccagaaggcgaagatgaaatttattctaaagaagactttattaaaatctttgatgaaaaacgcctatctaaatcgccagcatttttcgataaacagaaacttgcatgggttaataatcaatatatgaaacaaaaagatactgaaacagtatttgaattagctttacctcacttaattaaagctgaattgttaccggaaaatccaagtgaagcggacctagattggggacgtaaacttgtttcactttatcaaaaagaaatgagctatgctggagaaattgtaccgttatcggaattattcttccgtgatgaacaaacattaggtgacgatgagcaagaagttattgcaggtgagcaagtaccagaattgatgaaccatttatatagtaaattagaagcacttgaaccatttgaagctgctgaaattaaaaaaacgattaaagaagttcaaaaagaaacgggtatcaaaggtaaacaattatttatgcctatccgtgttgctgttactggtcaaatgcatggcccagaattaccaaatacaattgaagtactaggtaaagataaagtattatcacgtttgaaaaaatatgtataaataagcgttaaatattgtaaaggttgtgttaaatagataacacttgaaaaattacaataaacaacctatgattaacattgaaatcaacaaaggattagtatgtgatggacggtgtcaagagagtgtgcggtagctgtgagcacatcacttaaattacagaatgcacctttgtgcaaataaagtgaataacttaaatgagaattataaggaatagacttgatatcaatcagtacaaagtttgatttaggcaattgcttatataaaatgagagtggaaccgtgcaaaagcacctctaacaataaagttaggggtgcttttttataaggaggtagcagccttgtttaagatgttgaaaagaataaaagacgatgtaaatatggtgtttgaacaagatcctgcagcacgtacaactttagaagttgttacttcatatgcaggcgtgcacgcggtctggagtcatttgattgcacatgaactatataaaaagaaaaaatatgtcttagcgagattaatttcacaaattacacgcttttttacaggtattgaaattcacccaggcgcccaaatcggtagacgtttattcattgatcatggtatgggcgtagtgattggagaaacttgtcgaattggagataatgtaacgatttatcaaggcgttacattaggcggtacgggtaaagaaaaaggaaaacgccatccagatataggggataatgtacttattgctgcgggagcaaaagtacttggtaatattacaattaattcaaatgtgaatatcggtgcgaactcagtcgtacttaatagtgtacctagttattcaactgtagttggtattccaggacacattgtaaaacaagacggcagacgtattggcaaaacatttgatcaccgtaatttacctgacccaatctacgagcaattaaaagaacttgaaaaacaacttgagaaaacaagaaatggagagatacaagatgattacattatataatacattaacgcgtcaaaaagagacgtttgaaccaattgaacctggtaaagttaaaatgtatgtttgtggaccaactgtatataattatattcatatcggaaatgcacgaccagctatcaattacgatgtagtaagaagatattttgaatatcaaggctatgaagtcgtatttgtttcaaattttacagatgtagatgacaaattaattaaacgctcaaaagaattggacgaatcagttgaaacgattgctgatcgctacattgatgcattctacgaagatgtaggtgcgttaaatgtaaaaaaagcaacgtctaatccacgtgttatgaatcatatggatgacatcattaactttataaaagacctcgttgatgaaggctatgcctatgaaagtggcggcgatgtttattttagaacacgaaaattccaagattacggtaaattaagccatcaatctttaaatgatttaaaagtaggcgcacgtattgaacagggtgaacagaaggaagatgcattagattttacgttatggaagcaagctaaaccaggtgaaatcagttgggaaagcccatttggtgaaggtagacctggctggcatattgaatgttcagtaatggcttatcatgaattgggtgccacaattgatattcatgcgggtggtacagatttacagttcccacaccatgaaaatgaaattgcgcaatcagaggcacataaccacgcgccgtttgcgaactattggatgcataatggtttcatcaatatagataatgaaaaaatgagtaaatcattaggcaactttgttttagtacacgacatcatcaaacaaattgatccagatgtattacgctttttcatgattagtgtacattatagaagtcctattaattataatatggaacttgtcgaagcggctaaaagcggtttggaacgtgtacgtaacagctatcaagcgattgaagaacgtgaagcaattgctacagatattgaagcgcaaagtgattatattgctgaaatagataaaattttagagcaatttgaaaccgttatgaatgatgattttaatacagcgaatgctattactgcttggtatgatttggctaaattagcaaataaatacgtgctagaaaacacaacgtctacgaaagtacttggacgttttaaagaagtttatcaaatctttagtgatgtactaggagtgcctttgaaaggcaaagatagtgatgaactactagatgaagaagtcgaagcgctgattgaagaaagaaacaatgcaagaaaagataaagatttcgctcgagcagatgaaatacgtgatcaactaaaagaacaaaatattatattagaagacacgcctcaaggtgtgagatttaaacgtggctaatatgaataataaattattaaatccgttgacacttgcttacatgggtgacgctgtcttagatcaacacgtgagagcatatatcgttttaaaattaaaagcaaagcctaatcgtttacatcaagaagctaaacgctacgtttcagctaagagtcaagcgctgacgctagagtcattaatggaaaatgaatggttttcagaagaagaattagatatcgtgcgtcgaggtagaaacgctaaaagttataccaaagcaaaaaatacagatattcaaacatatagaaaaagttctgggctagaggcaatcattggttatttatatttagaaaaagaagatgcacgtttagcggcactattagaacaaattgtacaaatcgtagacgaaaggtagtgatactatggaagagatcgtaattgttggtcgacatgcagtaaaagaagctattgtctcaggacatactattaataaaattctgattcaagatactatcaaaaaaggccaaatcaacgaaattttaaaattagcgaatagtaataaaattatagttcaatctgtaccgaaatctaaaatagatggattgtcagattcacctcaccagggtgttgctgcttacattgctccatatgaatatgcggactttgatgcatttgttgcgcaacaaaaagcacaagataaattatcaacagtattaattttagatggtttagaagacccacataacctaggatcaatcttaagaaccgcagatgcttcaggtgttgatggtgtcataattcctaagagacgttcagttgctttaacacaaacggttgccaaagcatcgacgggcgctattcagcatataccagtaatgagggtgactaatttggctaacacgattgaaacgctaaaggataacggctattggattgttggtactgaagctgaaaattcaacggactatagagaaatggatgctggcatgccactaggtattgtcataggtagtgaaggtcaaggtatgagccgtttagttaaagaaaaatgcgatttctatatcaatattccaatggtaggtcatgttaacagtctaaatgcatcagtagcagcaagtttaatgatgtatgaagttttccgcaaacgtaattatatcggagataaagcatgaaagatcgttatttaatcattgatggatataatatgattggacaatcgcaggaattaagtcgtattgcacaagataaccttgaagaagcacgtgaacaattgctcattgctatagcgaactataacgcagtcattgcggatgaagttgtctgcgtattcgatgcttatgaacaatccggagcgcctacagaatatatgtatcatggtgttaaaacgatttttacaaaagaaaaagaaactgcagatagctacattgaacgttatgtatatgacttatatgacaaacatacaagacatattacagtggttacgagcgatatgagtgagcaacatgctatttttggtgcaggtgcatatcgtgtgtcttcaagagaaatgtggagagatttaagagaaaatgaaatttctgtatcgaaaaagctagatggatttaatgaacagaaacccagaacgcgtatcgaactttcaaatgaaattcttgaagaatttgaaaaattaagacgcggcgataatcattaattattatagcgtagtttgcttttttcagtccaactgctgtaatctttctttacttcaaggaaaggataacagtaatgacaagaaataaccgcattccaactaacactttaattaatggagaaaagagaaccaaaccaatcgatgtgcctgaaatttttaaagtcttaagcccaatgattcgtagacgtttatatcattttgctatacatccaaacgaccaagaagatttgtgtcaagatgtgctcgtaagattatactgtgcatttaaaaaatttgatttcactgatgacacacctattgagcattatgtaaatcgtgtgataaaaaatgtaaaaaatgattatatacgtaaaaaatgctatggcaaccaacgacaagaaatgctggtcaatgaatttatagtcaattatcaaaatagtaaaacagaacacccacttgataaacatatattagctttagagataggaagtcaattacaacagggattaatgaaactgacggtcttagaaaaaagtatcgtaatctgtttactaaatgactttaagccgaaagaaattgctgaaacactaaatatacaaatcaaagtggtttacaatgcgatacatcgttgtaaaatgaaattaagacgctatttagaaaatgagaaatagcgcgtgttttatttaattgtaacggtctgaatatatagcatatcacgtacaaagacgctattgccgattgacaattgacttagaaattatgtatagtatattggtattataatgagtaaggggaagacgaatgaaaaaagtaccattgaattgtgaagtgtgtggtaatcgaaattataacgttcccaaacagagtaatcttgcatctagactggaattgaagaaatattgtccgagatgtaatgcacatacgttgcataaagaatcgaaataacaaacgacatattaaatttacaattgagtgaatatgcccttccatttaagttgagagtattgtatttgcttgatttgttgcatggaataagcaaataaggaataacgaaatatacggaggtcttataaatggctaaaaaagagaatttcttccaaggcgtaaagtcagaaatggaaaagacaagttggccaacgaaagaagaattatttaaatacacagtcattgttgtagctacagtagtatttttcttagtattcttctatgccttagacttaggaattggtagaattatagagttaattaaatagataggagtgacgacatgtctgaagaagttggcgcaaagcgttggtatgctgtgcatacttattctggttatgagaataaagtgaaaaagaatttagaaaaacgtgttgaatctatgaatatgactgaacaaatattcagagttgttataccagaagaagaagaaacacaagttaaagatggcaaagccaaaacattaactaaaaaaacattcccaggatacgtgctagtcgagttagtaatgactgacgaatcatggtatatcgtaagaaatacacctggtgtaacaggatttgttggttcagctggtgctggatcaaagccaaatccattacttcctgaagaagcacgcttcatccttaaacaaatgggcatgaaagaaaaaacaatcgatgttcaaattgacttaggtgaacaagtaagaattaaatcaggcccatttgcaaatcaagttggtgaagttcgagaaattgaagcggataaattcaaacttactgttcttgtagacatgtttggtagagaaacaccagtagaagtagaatttgatcaagttgaaaaactgtaaggcatatcaggacgttgatactgatagaggtcatacgcaacttgcaaaagttagaagtatgattttatatacattaagtacagctgattactgaaataatttagaagaaaaagatgagtttggcctcacgtattaacagaagctaaaagctatagcattttggtctttgctaatagttaaggaggcggttgttggctagattaaaaagcctttaaaattagggctcattaacactagtcatcttgctcatgtgggatacgggcattattgtagtgatattagatttatattccgttcccaaaattttacaaattaccattgctttatgtaatgggttaatgttataatactgtggtcgcgctcatagagcgttcatttcgtcacgaaatgtagaagagtgggaggacaaaactgagtcctgtgaccacatcacgatatcaaggaggtgcacatcgtggctaaaaaagtagaaaaagttgttaaattacaaattcctgcaggtaaagcaaatccagcaccaccagttggtccagcattaggtcaagcaggtgtgaatattatgggattctgtaaggaattcaacgcacgtacacaagaagacgcaggtttaattattccggtagaaatcagtgtttatgaagaccgttcatttacatttattacaaaaactccaccggcgccagtactacttaaaaaagcagcaggcgttgaaaaaggttcaggcgaacctaacaaaacaaaagttgctacagtaactaaagatcaagtacgtgaaattgcaaaccaaaaaatgcaagatttaaatgctgcagacgaagaagcagctatgcgtattatcgaaggtactgctcgtagtatgggtatcacagttcaataatataaattagtaatgaaaacatagattgacgatagaagcagatgacagaaatgacaaacatgatgacagcgttcaatattgtcgtaatatgaggagaaatgtcatttattaaggaatgttaattcctaagataaaatacaattttgacctcactgttatctgctcttaacttgtgaaagcaagtaaatgtgggaggaaattccgctaaaaccactaaaggaggaacatgaaatggctaaaaaaagcaaaagatatcaagaagcagctagcaaaatcgatcgcttaaaacactacaatgttgaagaagctgttgaactagctaaagaaacaaacatcgctaactttgatgcatcagttgaagtagcattccgtttaggtattgatactcgtaaaaatgatcaacaaatccgtggagcagtagtgcttccaaacggtactggtaaatcacaacgtgtattagtgttcgcaaaaggagacaaagcagcagaagctgaagcagcaggtgctgatttcgttggcgaaggcgaatatgtagaaaaaatccaacaaggttggtttgactttgacgtagtagtagctacaccagacatgatgggcgaagttggtaaacttggtcgcgtattaggacctaaaggtttaatgcctaaccctaaaactggaacagtaactatggacgttaaaaaagctgttgaagaaatcaaagctggtaaagtagaataccgtgctgagaaatcaggtattgttcatgcatcaattggtaaaacatcatttgatactgacaaacttgttgaaaacttcaaaactttacaagacgtattaactaaagcaaaacctgcttcagctaaaggtacgtacttcaaatctgttgctgtaactacaacaatgggtcctggagttaaagttgatacttcaagcttcaaactataatctataaataaatgaaaaaggctgaaaggtttactttcagtctttaaaaaatattgacattgtacattaatttagttatattggttaatgtattattttacctaagacagtaggagttagtaataacttaaaatttgatcctaccgaggctaaaattgacttgaacgtgaagattttagatctttcaagcactttttgccgtgggtagaaagtgttttttttattggataatctgaggaactgacgaacgtcaatccacagaacttcaaaattaaaagcaccaaactaaaatctatggaggtgtctaaatgtctgcaatcatcgatgcaaaaaaacaagaagttgatattattgctgaacaacttaaaaactcagtatctacagttatcgttgactatcgtggtctaagcgttgctgaagtaactgaattacgttcacaattacgtgaagctggtgttgaatacaaagtattgaaaaacactatggttcgtcgtgcagctcaacaagctggtattgacggtttagatgaattcttagtaggtcctactgcagttgctacttcaacagaagatgttgttgctccagcaaaagttatcgcaggatttgcaaaagaacatcaagcattagaaattaaaacaggtgttatggaaggcaatgttatttctgctgaagaagttaacactgttggtacattaccatcacacgacggtcttgtttctatgcttttatcagtattacaagctccagtacgcaacttcgcttatgcagttaaagctgttggagaagacaaagaatcaaaagaagaaagcgctgaataattgcgcataaactaattaaaattaatggaggaatattaaaaatggctaatcaagaacaaatcattgaagcaattaaagaaatgtcagttttagaattaaacgacttagtaaaagcaattgaagaagaatttggtgtaactgcagcagctccagtagcagcagcaggcgcagcagcaggcggagacgctgaagctgaaaaaactgatttcgatgttgaattaacttcagctggatcatctaaaattaaagtcgttaaagctgttaaagaagctactggcttaggattaaaagatgctaaagaattagttgacggagctcctaaagtaatcaaagaagctttacctaaagaagaagctgaaaaacttaaagaagcattagaagaagttggcgctacagtagaattaaaataattctagcttgctaacaattcataattatatattgaggcttatctgcgttgcttaatgcagcaactacttcggtacgttgggattaagtgcgctatagataggctgatatctttgagaagtgaaaaccccgttatccatataacggggttttatcttatttgatcaatatccaatcaaacgggtatagtattaatctaagaagaattagattaaagaggtgtagtcatgaatcattactatgatgaaaatcctgaagtagaaagtgatgagttgctttttacgtactcctacgataaccatgatttagaactaataacagattcaggtgtattttctaaaggaaaaatagacttcggctctgatttattagtgacaacatttttgaaagcatatcctcctggtcccacgaagaaaattatagacgttggttgtggctatggccctatcggtttaatgattgcaaaagtttccccacatcacgaagtgacaatggttgatattaaccaaagagcactatcattatcaagaaaaaataaaaaaagaaaccgtatagacaatgctgagattattgaaagtaatggtttatcacaagtagaagataacacttatgattttgtactgactaatccgccgattagagcaggaaagcaagtcgttcacagtattttagaagatgcttttaataaattgaaacaaggtggcgccttgtatgtagtaattcagaaaaaacaaggtatgccgtcagcaaagaaaaaaatgcaagaaacattcgataacgtggaagtattagaaaagagcaaaggctactacattttaagaagtgtaaaaggttgattaaatagttgtattctgatatagtaatagaatgtaaaaaattatgttcaataagtgtgtacttttacgtataaattaacaatgtatataaggtgaaatagaaaatggtgtcatgagtatgctaccgttttctttttgtctaattatattgggtgatttagtaaaagtaaacacgcaatttttgaggggtgaatctgtttggcaggtcaatttgtccaatatggaagacatcgtaaacgtagaaactatgcgagaatttcagaggtattagaattaccgaatttaattgagattcaaactaagtcttacgattggttcttagaagaaggtttattagaaatgtttagagacatttctccgattgaagatttcacaggcaatctatctttagagtttgtagattacagacttggagaaccgaaatatgatttagaagaatctaaaaaccgtgatacaacgtattctgcacctctacgtgttaaagtgcgtttgattatcaaggaaactggcgaagtaaaagaacaagaagtgtttatgggtgatttcccattaatgacagatacaggtacattcgtaattaacggtgctgaacgtgttatcgtttcacaattagttcgttcaccatccgtatacttcaatgaaaaactagataaaaatggtcgtaccaacttcgatgctacaattattccaaaccgtggtgcttggttagaatatgaaacagatgcaaaagatgttgtttacgtacgtattgatagaactagaaaattaccattaacagtattattacgtgctttaggtttctctacagatcaagaaatcgttgatcttttaggtgacaatgagtatttacgtaatactttagaaaaagatggtacagaaacaacagatcaagcgctattagaaatctatgagcgtttacgccctggtgaaccacctacagtagaaaatgctaagagtcttttatattctcgtttcttcgatccgaaacgttatgacttagcaagcgtaggtcgttacaaagcaaacaaaaaacttcatttaaaacaccgcttgtttaatcaaaaattagcagaacctattgttaatactgaaacaggtgaaattgttgctgaagaaggtactgtgcttgatcgtcgtaatctcgatgaaatcatggatgtactggaagcaaatgctaacagtgaagtctttgagttagaaggtacagtgattgatgaacctgttgaaattcaatctattaaagtttatgttcctaacgatgaagaaggacgtacaacgacagtgattggtaatgcattccctgattcagaagtgaaatgtattacaccagcagatattattgcatcaatgtcttacttctttaacttattaagtggtattggcttcacagatgatattgaccaccttggtaaccgtcgtctacgttcagtaggtgaattgttacaaaaccaattccgtattggtttatcaagaatggaacgtgttgtacgtgaaagaatgtctatccaagacactgattctgtaacgccacaacaattaatcaatattcgtccagtgattgcatctatcaaagaattctttggtagttcacaattatcacaattcatggaccaagcgaatccgttagctgagttaacgcataaacgtcgtttatcagctctaggacctggtggtttaacgcgtgaacgtgctcaaatggaagtacgtgacgttcactattctcactatggccgtatgtgtccaattgaaacgccagagggtccaaacatcggacttattaactcgttatctagttatgcgcgtgtaaatgaattcggctttattgaaacaccttaccgtaaagtggatcttgaaacgaattcaatcacggatcaaattgactatttaacagctgatgaagaagatagctatgttgtagcacaagcaaactcaacattagacgagaatggccgtttcacagcagacgaagttgtttgtcgtttccgtggtaataatacagttatggccaaagaaaaaatggattatatggatgtctcacctaaacaagttgtttctgcagcgacagcatgtattcctttcttagaaaacgatgactctaaccgtgcattgatgggtgcgaacatgcaacgtcaagcagtgccattgatgaatccagaatcaccatttgtaggtacaggtatggagcacgtggcagcacgtgactctggtgcagcaattgttgcaaaacgtaaaggtcgcgttgagcacgttgaatctaatgaaattcttgttcgtcaacttatcgaagaagacggtcaagaatacgaaggcgaattagatcgctatccattagctaaattcaaacgttcaaatacgggtacttgttataaccaaagacctatcgttgcttctggtgacgtagtaactaaaggtgaaattttagccgatggtccttcaatggaacttggtgaaatggcattaggtagaaacgtagttgttggtttcatgacttgggacggttacaactatgaggatgctgttattatgagtgaacgcctagttaaagatgacgtatatacgtctattcatattgaagagtatgaatcagaagcgcgtgatacgaaactaggacctgaagaaatcactcgcgatattcctaacgtttctgacagtgcacttaaaaacttagatgaccgtggtattgtatacgtcggcgctgaagttaatgatggtgacattttagtaggtaaagtaacgcctaaaggtgtaacagaattaactgcagaagaacgtttactacacgctatctttggtgaaaaagcacgtgaagttcgcgatacatcattacgcgtacctcatggtgcaggtggtattgttctagatgttaaagtctttaaccgtgaagaaggagacgatacattatctccaggtgttaaccaattagtgcgtgtttatatcgttcaaaaacgtaaaattcacgtaggagataaaatgtgtggtcgtcatggtaacaaaggtgttatttctaaacttgttcctgaagaagatatgccatatcttccagacggcacaccaatcgatatcatgttgaacccacttggtgttccttcacgtatgaatatcggacaagtattagagctacacttaggtatggctgctaaaaacttaggtattcacgttgcatcaccagtatttgatggtgcaagtgatgaagacgtttggtcaacaattgaagaagctggtatggctcgtgatggtaagacagtattatacgatggacgtacgggtgaaccattcgataacagaatttcagtcggcgttatgtacatgctgaaacttgcacacatggttgatgacaaactacacgcacgttcaactggaccatattcacttgtaacgcaacaaccacttggtggtaaagcacaatttggtgggcaacgtttcggtgaaatggaggtatgggcacttgaagcttacggtgctgcatatacacttcaagaaattttaacttacaaatccgatgatacagtaggtcgtgtgaaaacatatgaatctattgttaaaggtgaaaatattactaaaccaggtgttcctgaatcattccgagtattgatgaaagaattacaaagtttaggactagatgttaaaatcatggacgagcatgacaatgaaattgacatgcaagataatgaagaagaagatgtcgttgaacgtaaagtggatcttcaacaaaaagatgctccacaatcacaaaaagaagttacagactaattgcatttaagtttataaatgaatatgccgtgaagagctgtgtgcttaattagtgcacactctaagcgggcatttcattattgatatagagcaatcaatcaatttgcacagctaatctaaattgaaggaggtaggctccttgattgatgtaaataatttccattatatgaaaataggacttgcttcacctgaaaaaatccgttcatggtcttttggtgaggttaaaaagccagaaacaataaactatcgtactttaaaaccagaaaaagatggtctattctgtgaaagaatatttggacctacaaaagactgggaatgtagttgtggtaaatacaaacgcgtacgttacaaaggtatggtttgtgatagatgtggcgtagaagtaactaaatctaaagtgcgccgtgaaagaatggggcacattgaattacctgcacctgtatcacacatttggtatttcaaaggtattccaagccgtatgggtctattattagacatgtcaccaagagcgttagaagaagttatttactttgcttcatacgttgttgttaatccaggaccaactggattagagaaaaagacattattatctgaagctgaattcagagaatactatgataaattccctggtaaattcacagctaaaatgggtgctgaaggtatcaaagaattacttgaagaaattgatttagatgctgaactcaagcacttacgtgatgagttagaatcagctactggtcaaagacttactcgtgcaattaaacgtttagaagttgttgaatcattcagacattctggtaacaacccagcatggatgatcttagacgtacttccaattatcccaccagaaatcagaccaatggttcaattagatggtggacgttttgcgacaagtgatttaaatgatttataccgccgtgttatcaaccgtaacaaccgtttgaaacgtttattagacttaggtgctcctggcatcatcgtacaaaatgaaaaacgtatgttacaagaggctgttgacgcacttattgataatggtcgtcgtggccgtccagtaactggtccaggtaaccgtccattaaaatcactttcacacatgttaaaaggtaaacaaggtcgtttccgtcaaaacttattaggtaaacgtgttgactattcaggtcgttcagttattgcagttggacctagcttgaaaatgtatcaatgtggactacctaaagaaatggcacttgaattgttcaaacctttcattatgaaagaattagttcaacgtgaaattgcgacaaacatcaaaaacgcgaaaagtaaaattgagcgcatggatgatgaagtatgggatgtattagaagatgttattaaagaacacccagttcttttaaaccgtgcacctacacttcacagattaggtatccaagcatttgaacctacacttgttgaaggtcgtgcgatccgtctacatccacttgctacaacagcttataatgccgactttgatggtgaccaaatggctgttcacgtaccattatctaaagaagctcaagctgaagcgcgtatgttaatgttagcagcgcaaaacatcttgaaccctaaagatggtaaaccagttgttacaccatcacaagatatggtattaggtaactattaccttacattagagcgtaaagaagcagtgaatacaggtacgatttataatgatacgaacgaagtactaaaagcttatgcaaatggctacgttcacttgcatacaagaattggtgtacacgcagcatcattcaataatcctactttcactgaagaacaaaacaaaaaaatcttactaacgtctgttggtaaagtaatatttaatgaaatcattcctgattcatttgcatatatcaatgaaccaacacaaacgaacttggaaaataaaacacctgagaaatatttcattgcaccaactgaaattggtgaagaaggcttgaaagcttactttgatgaacaaccgttaatcaaacctttcaataagaatttcctaggaaatgttattgcagaagtgttcaaccgtttcagcatcactgatacgtccatgatgttagatagaatgaaagacttaggattcaagttctcatctaaagcaggtatcactgttggtgtatctgatattgtggtactaccagacaaacaagatatcttagatgaacatgaaaaactcgttgaaaaagtaacgaaacaatttaatcgtggtttaatcactgattttgaacgttacaacgcagtaatcgaaatttggacagatgccaaagatcaaattcaaaacgaattgatgggctcactagaagaaacaaaccctatctttatgatgagtgactctggtgcccgtggtaacgcgtctaactttacacagttagcaggtatgcgtggacttatggctgcgccttctggtgaaattatcgaattaccaatcacgtcttcattccgtgaaggtttaacagtgttagaatacttcatctctactcacggtgcgcgtaaaggtcttgccgatacagcacttaaaacagccgattctggttatcttactcgtcgacttgttgacgttgctcaagatgttattgtacgtgaggaagattgtggtactgaccgtggtttacttgtttcagatatcaaagaaggtactgaaatgattgaaccattcatcgaacgtattgaaggtcgttattctaaagaaacaattcgtcatccagaaacaaatgaagtaattgttaatcctgacgaattagtaactgcagaaatcgctaagaaaattactgatgctggtattgaggaaatgtatatccgttcagcatttacatgtaacacacgtcatggtgtatgtgaaaaatgttacggtaaaaaccttgcaactggtgaaaaagttgaagttggtgaagcagttggtacaattgctgcccaatcaattggtgaaccaggtacacagcttacaatgcgtacattccatacaggtggtgtagcaggtagcgatatcacacaaggtcttcctcgtatccaagagatcttcgaagcacgtaatcctaaaggtcaagccgtgattactgaaatcgaaggtgttgttgatgacatcaaattagcgaaagatcgccaacaagaaattgtaattaaaggcgctaatgaaacgaaatcttatctagcttctggtacttcaagattgaaagtagaagttggacaaagtgttgaacgtggtgaagttctaacagaaggttcaattgagcctaagaactatttatctgtatcaggtttaaatgcaacagaaagttatttactaaaagaagttcaaaaagtttaccgtatgcaaggtgttgaaatcgatgataaacacgttgaggttatggtaagacaaatgttacgtaaagtacgtatcattgaagctggagatactaagttacttccaggttcattagtagatattcataactttactgatgccaaccgtgaagcatttaaagaacgtaaacgtcctgcaacagctaaaccagtattactaggtattacgaaagcgtctcttgaaactgaaagcttcttatcagcggcttcattccaagaaacaacacgtgtacttactgatgctgcaattaaaggtaaacgtgataacttactcggtcttaaagagaatgttattatcggtaaattaattccagctggtacaggtatgagacgttatagagatgttgaatacgataaagctgcacctgaaactgaaattgtagaagaagtacaaactactgaaatataattttgagttaaatgaacaaggtggtcggaatgcgattttcgatcactttgttttttaattatttttgcaaaataattggatttaaagttgactcagcagtaatgaaaatgttattattattaaggttgatgcaagcagaactttggaggatatttatatgtctaatgaaaaagttgcacgctttaacaaacaacattttgttattggtcttaaacaaacgctaaaagctttgaataaagatcaagttacatcattgattatcgctgaagacgtagaagttcatcttatgactcgcgtgttgagccaaatcaatcacaaacacatacctgtttcatttttcgaaagcaaacaagctttagggaaatatgtaggtataaacgttaatgcagctattgttgcattattaaaatgagattagtaagaatgattcttactaaattttatttacccttaaaatgaaccacctggatgtgtgggattataaatgaggaaaggaggaactaatcatgccaactattaatcaattggtacgcaaaccaagacaaagtaaatcaaaaaaatctgattcaccagcattaaacagaaattttaacagtaaaaagaaaaaatttactgatttaaattcaccacaaaaacgtggggtttgtactcgtgtcggtactatgacacctaaaaaacctaactcagcgttacgtaaatatgcgcgtgttcgtttgtctaacaacattgaaatcaatgcgtatatccctggtatcggacataacttacaagaacacagtgttgtgcttgtacgtggtggacgtgtaaaagacttacctggtgtacgttaccatatcgtacgtggtgcgcttgatacttcaggtgttgatggacgtagacaaggccgttcattatacggaactaaaaaacctaaaaaataagtttaagattgcgtaaattttcgctataaaatttaaaattatactatagtaggaagggaggatttacattatgcctcgtaaaggatcagtaccaaaaagagacgtattaccagatccaattcacaactctaaattagttacaaaattgatcaacaaaattatgttagatggtaaacgtggaacagcacaaagaattctttattctgcattcgacttagttaaagaacgtagtggtcgtgaagcagttgaagttttcgaagaagctatcgataacatcatgccagtattagaagttaaagctcgccgtgtaggtggttctaactatcaagtaccagtagaagttcgtccagagcgtcgtactacattaggtcttcgttggttagttaactattcgcgtcttcgtggtgaaaaaactatggaagaacgtttagctaatgaaatcttagatgctgctaacaacactggtggagcagttaagaaacgtgaagacacacataaaatggctgaagctaacaaagcattcgctcactatcgttagtaggatagtagctttttccctgagcatgttccacaaagatagtttactatcaccggtgcgtgtttagggcatcgccatatttaaagtatttattcgcagttatactggaaggagaaaaatacatggctagagattttagtttagatagaactcgtaatatcggtatcatggctcacatcgatgctggtaaaacaactacgactgaacgtattctttactatactggacgtatccataaaattggtgaaacacacgaaggtgcttcacaaatggactggatggaacaggagcaagaccgcggtatcactatcacatcagctgcaacgacagcagaatgggataaccaccgtgtaaacatcatcgatacacctggacacgtagacttcactgttgaagttgaacgttcattacgtgtacttgatggcgcagttacagtattagatgcacaatcaggtgttgaacctcaaactgaaacagtttggcgtcaggcaacaacttatggtgtacctcgtattgttttcgttaacaaaatggacaaattaggtgctaactttgaatactcagtaagcacaattcatgaccgtttacaagctaacgcgcaaccaattcagttacctatcggtgctgaagatgaatttgaagcaatcatcgacttagttgaaatgacatgtttcaaatacacaaatgacttaggaactgaaattgaagaaattgaaattcctgaagatcataaagaaagagctgaagaagctcgtgcggcattagttgaagcagttgctgaaactgacgacgaattaatggaaaaatatcttggtgatgaagaaatttcaatccctgaattgaaagctgctatccgtaaagcaactactgatgtagaattctacccagttcttgttggtacagcattcaaaaacaaaggtgttcaattgatgcttaatgcagtaattgattatttaccttcaccattagatgttaaaccaattattggtcaccgtgctgataatccagatgaagaagttatcgcaaaagctgatgacaatgctgagttcgctgctttagcgttcaaagtaatgactgacccttatgttggtaaattaacattcttccgtgtttattcaggtacattatcatcaggttcatatgttaaaaactctacgaagaacaaacgtgaacgtgtaggtcgtttactacaaatgcacgctaactctcgtcaagagttaaacacagtatattcaggagatatcgctgctgcggtaggtcttaaagatactggtactggtgatactttatgtggtgaaaaaaatgacatcatcttggaatctatggatttcccagagcctgttattcacttatcagttgaaccaaaatctaaagcggaccaagacaaaatgactactgctttagttaagttacaagaagaagatcctacattccatgcacacacagacgatgaaactggacaagttatcattggtggtatgggtgagcttcacttagatatcttagtagaccgtatgaagaaagaatttaacgttgaatgtaacgttggtgcgccaatggtttcataccgtgaaacatttaaatcatcagctgaagttcaaggtaaattcgctcgtcaatcaggtggtcgtggtcaatatggtgacgttaaaattgaattctcacctaatgaaacaggtggcggtttcgaattcgaaaacgctatcgttggtggtgtagttccacgtgaatacattccatcagttgaagcaggtcttaaagattcaatggaaaacggtgtattagctggatatcctttaattgatgttaaagctagattatttgatggttcataccatgatgtcgattcatcagaaatggccttcaaagtcgctgcatcattagcacttaaagaagctgctaaaaaatgtgatccagttatcttagaaccaatgatgaaagtaacaatcgaaatgcctgaagagtacatgggtgacatcatgggtgacgtaacatctcgtcgtggacgtgttgatggtatggaacctcgtggtaatgcacaagttgtaaatgcttatgtaccactttcagaaatgttcggttatgcaacatcattacgttcaaacactcaaggtcgtggtacttacactatgtactttgatcactatgctgaagttccaaaatcaattgccgaagacattatcaagaaaaacagtggtaataaagctgaataattaaacttgttttgtgagacaactgtctgtacaatacatgtaaagcttaattatgtggcttgtagttttattaattgattttttgggaaaaatgcattataaaggtactgtatggtcctttataccaaaaaataaaacaatcttctcatgatggtgagaaactgtcatgagagataattttaaaaatttattttctaacgaataggagagattttataatggctaaagaaaaatttgaccgctcaaaagaacatgccaatattggtactattggtcacgttgaccatggtaaaactactttaacagctgctatcgcaactgtattagcaaaaaatggtgactctgtagcacaatcatatgacatgattgacaacgctccagaagaaaaagaacgtggtattacaatcaatacttcacacatcgagtatactactgacaaacgtcactatgctcacgttgactgcccaggtcacgctgactatgttaaaaacatgatcactggtgctgcacaaatggacggagctatcttagtagtatctgctgctgatggcccaatgccacaaactcgtgaacacattcttttatcacgtaacgttggtgttccagcattagttgtattcttaaacaaagttgacatggttgacgatgaagaattattagaattagtagaaatggaagttcgtgacttattaagcgaatatgacttcccaggtgacgatgtacctgtaatctctggttctgcattaaaagctttagaaggcgacgctgactatgagcaaaaaatcttagacttaatgcaagctgttgatgacttcattccaacaccagaacgtgattctgataaaccattcatgatgccagttgaggacgtattctcaatcactggtcgtggtactgttgctacaggccgtgttgaacgtggtcaaatcaaagtcggtgaagaaatcgaaatcatcggtatgcaagaagaatcaagcaaaacaactgttactggtgtagaaatgttccgtaaattattagactacgctgaagctggtgacaacattggtgcattattacgtggtgtttcacgtgatgatgtacaacgtggtcaagttttagctgctcctggtactatcacaccacatacaaaattcaaagcggatgtttacgttttatctaaagatgaaggtggtcgtcatacgccattcttcactaactaccgcccacaattctatttccgtactactgacgtaactggtgttgttaacttaccagaaggtactgaaatggttatgcctggcgataacgttgaaatggatgttgaattaatttctccaatcgctattgaagacggtactcgtttctctatccgtgaaggtggacgtactgttggatcaggcgttgttacagtaatcaacgaataatataaatttctatctatgatagatttttaagagactctttagggagtctcttttttcatagaactcctattcactatgtgaattaggggttcttagtgcattagctgctagctaatgtaaaccaaatcaattcagtttctgaattaaggggcttaatgcattagataatagctaatgttaaacaaggaaaggcgatgtcattattaagtgacatcgcctgttttgatttgcttttatataaaggaatacattcgcttatgcgaatgcataagtcttactaattcagcacagctgaaaagtaagactataaagtcatgcaatgactaaggctagtaaggtttacttgagctaaagctcatgcataaaagcacctaagtcatgtaatgactaaggctagtaaggtttacttgagctaaagctcatgcataaaagcacctaagtcatgcaatgactaaggctagtaaggtttacttgagctaaagctcatgcataaaagccactaacgtaactaagttacgaagtggctttaacaattacgttttcgagttcaaggatttttaggaattcgcatgctgcatatttcattgccttttcatcaatattgaagttcgggctatgatgtgggtgtgtagtctctttttctggattaccacaaccagttaaaaagaatgcaccagggcgaacttttaaatagtgtgagaaatcttcaccaatcatcattaactcagattcatagaaacgtaaattcatctcatttgcagcttgtttaacaatttcataattatttggatgattgtgtacaggtaggtagcctttaacataatctaatgtataagtaatgtcatttgctagagcaagcccctgcaataatttgtccattttagtgataatatgactttggacttctgtatcaaaggtacgaacggtgcctttacagaaagcagagtcaggaataatattgtcggctgaacctgcttgaaccataccaaagcttatcacagcttgtttaactggatcaattgttcgtgagacaatcttctgagcactcataatgaattctgccataattactactggatcaatcgtttcatggggtttagcaccatggccgcctttaccttgaatggtgatattaaattcatcgggagatgccatcatagcaccaggacgtgaataaatcatacctgttggataacctgtccataaatgattaccataaattttgtctacgttgctgagacaaccatcatcaatcatttcttgtgagccgcctggcataatttcttcaccatattgaaagattaatacaacatcgccatttagtgaggataaatgattctcaataatttctgccacaccaagtaagattgctgtatgaccgtcatggccacatgcatgcatggcacctggatttttagatttatatgatacgtctgttaattcatctattggtaaggcatcgaagtcggcacgtaaggcaactgtagggccatcaccctgtcctttgaatgttgcaacaataccatttctaccaactggtgtacgtatctcgcaagataattgacttaattgattcatgataaagtcatgtgtgtgatgttcttcaaatgataattcaggatattggtgtagataacgacgtacttgcaccatcctactttctttttgttgtgctagttgaaaccaatcaaacaacttcaacccttcttccttcagcattttcatccattatatcattttacgtgtagcaactgtaggtacaaataattaacaaagctattaaattgtagaaaacgctttctaatatatcattattctactttccacaatttaaaaaataggttatgattaacttgaaaactaagataactcaaagggggacttgcagtggttcaatcactacatggctttttagatgaaaatattcaatatttaaaagataatggtttatataatgagatagatacaattgaaggcgccaatggacctgaaattactatcaatgggaaaaattatgttaacttatcttcaaacaattatttaggactagcaacaaacgaagatttgaaacaagcagcaaaagatgcaattgatacacatggtgtaggtgccggtgctgtgcgttcaatcaatgggacattagatgtacatgatgaattagagaaaacacttgctgaatttaaagatactgaagcagcaattgcatatcaatctggattcaactgtaatatggctgccatttcagcagttatgaataaaaatgatgcaattctttctgatgaattaaatcatgcatctattattgatggttgtcgtttatctaaagcgaagattattcgtgtaaaccattcagatatggaagatttacgcgctaaagcaaaagaagccgttgaatcaggacaatacaataaagtaatgtacattacagatggtgtcttcagtatggacggtgatgttgctaaattaccagaaatcgtagaaattgctgaagaatttggcttaatcacatatgttgatgatgcacatggttctggtgtcatgggtaaaggtgctggtacggttaaacattttggcttacaagacaagattgatttccaaattggtacattatcaaaagcgattggtgtcgttggcggttatgtagcaggtacgcaatcattaatcgactggttaaaagcacaatcaagacctttcttattctcaacttctttagcacctggagatacgaaagccatcacagaagcagttaaaaaactaatggcttctacagaattacatgataaactttgggaaaatggcaattatcttaaagatggtttgaaaaaattaggctttgatataggtaattcggaatctccaatcacacctgttattattggtgatgaaaaagaaacacaagcctttagccgtcgtttgaaagaagaaggcgtatatgtaaaatccatcgtattcccaactgttcctaaaggtacaggtcgagtgcgtaatatgccaacagctgcacatacaaaagaaatgttagatcaagcattagcagcatttgaaaaagttggtaaagaactaggtacaattaaataaatataaccgttcatgtatagcagcgtgaatatagtacaaaattaagtttaaaacgtttggagatggtatgtcttcaagcgtttttactatataatggcaacacattattgtatggagtgtgataaatatgacaaagttaatcatcattagaggtaactctggcagtggaaagacaacgatcgcacagaaattacaacatacattaggcacaggtgtgatgttagtagggcaagatgacatacgtcgcaatatgttgaatgtacctgaccaacctaataatttagccattcaacttatagatgacattgtgaattatggcatcgcacattgcgattatgttattttagaaggtattttaaatagtgctaaatacggttcaatgattgagcgcttaatgaatcaaattaacgtagacgcatatgcttattatttcaaactaccatttcatgaaacagtaagaagacaccatttgaaagatgaaacagattttggtgaagaagcaatgatgcgttggtttgttgaaaatgacatattaaaggtaaaccaagaaacgtatctataccaagaaatgtctgaaaatgaaataataaggaagattctagaagatatcatttaatataaaaatttgaacataattaaactagcctgtgatacggtatcaatacatattcacagactagtagttattattatttgaaaggatttttagacttttgcgcagcttcacgattttctttattttgcataaatggtatagcaaaccataagatgtgtaacatacttgctaaaataataagtacaataggtataaagatttcaataatacttatatctacgacaaatgatgcaagcacaaaagcagtaattgacggtatggcacaaacgattacgacagttaacaatacaaattgtatgacttgtgtcgttaagggactataaatatccataatcaagatggcgatataaaatagtgtaataaatgcgagtaacaccacaacccaaccggtcgacataccaccttgtgttttaatatagtcttgataaggtgatagcgtcggtaaaataaatagaatgacggtggataaccatgataagattccgaaaaagataaagaaaatttttgaagtattattgttattcataaaaaacacctcctaagatacaaaatctttgttggcttatatttgatttatttaatagttggtattgtataatatactcgtattttattggtaacgcttacatttatatgtatacccgttaaataaagttttaaagcatcataaaaaaggtattaaataggtataagcatgttattgcatacatcagtgatgttgtgataacaataaaacacaaagctattcattatataatagataaagtgtgcgagtgaacatgataaggggattttaaatgcataaaaatttggggttgcatttcactacacaacgtcttatcattagaccgttggaagaaaatgattacgaatcatggttaagtgggtttgtaaatagaaagccatcacaatataggcatgacaaaggtcaagtagatatgtcagatgctacagaaccttggttcgcggcaatggtgactagacagcaacaagcgattgaagcggatgatttatatatatttggtatttttgataaagtacatcaacatataggtatgctcaatattaagaacttaagtagagatcaattccaatgggcagaaattggctactttattcataatcaatattggcatcaaggatttgcttacgaagctttaactgaattagtaaaacaaacacgagacacattacattttcatagaattgaagcacatattaatttggataataatccatctatccaattgattgaaaagttaggctttcaattcgaatgtgtacgtaaaggttttatttttgaaaatgaacaatggacagatcattatgtgtattatatcaacacacatgataatcatttataaacgtaggtcgagaaaggaaggagtgtcaacatggttgaatttagagagttaacaatgggtgacgaattaatgtattgtgattatatgagagagtggattgatcatgatgaaaaaattgtccctacaattacaaatattacaaaatatagtaattttgaagagttagtacatgaattagctgataataagtcacatgatgaatcagtggataataccacattattcttaatagaggatgatgaaattatcggtgcggcgaacattcgtcacaatttaaatgaacagcttaaaaaaataggcggccatgttggctacggtatccgtaagaaacatcgtggtaaaggatttggtaataaaatcctgaaaaaatcattggattacctatcaagaatcggtgttcaagaagcattagtgacatgtacggaagataatgaagcgtctgtagcagtcattaagcataacggtggcgaagaaattgaatcatcgacactggaagatggcacagttgtccgtcgtttccaaattgaaatagcgtaattaaacgagaggttgataatcttaaaagattatcgcctctttttttatttaaatgtttcaaaatttataaattatgagtctactatgaaactgcaaacataaataaaggacttcattataattttcaagtataattagtactaggtattaaaaacaaatgttagaaatgaggtttattgatgtcgaaagtaataaaagatatacatacagcttttgaaggattggaagatggaatgacagtacttgctgggggctttgggttatgtggtattcctgagcatagtattgaagcaattcgtacaaaaggtacaaaaggcttaactgttgtgagtaacaactgcggcgtagatgacttcggcttaggccgtttattagaatataagcaaatagataaaatgattagttcctatgtaggcgagaataaaatatttgaacaacaactgattaatggtgaattggatgttgaattgacaccgcaaggcacactagctgaaaagttacgttctggaggcgcgggaataccggctttttatacaaaaacaggtgtcggtacaccgattgctgaaggtaaagaaacgcgtgaatttgatggagaaacgtatttaatggaacgcacactaacaggtgactttggtattgtcaaagcacaaaaagcagatacatttgggaatttagtgtttgaaaaaacagcacggaacttcaatccattatgtgcgatggcagctaaaacaacggtcgttgaagtagaagaacttgtagaggtaggagaaattgatccagatgccgttcatatgtcaggtgtgtatgtagatttcatctatgtcggcgaacattttgagaagcgtattgaaaagcgtacagtgaaggaggccaatcatggataaaaaagtacaacgccagaaaattatccaacgtgctgctaaagaaattaaaagtgatatggtaattaatctaggtattggtatgcctacattggttgcgaatgaaatgaatgaccatgttgaaaatgtttactttcaatctgaaaatggcttacttggtatcggaccatatccgactgaaaatgaagtggatccagacttaatcaatgcggggaaagaaactgtaacagctgctaaaggggcgtcttactttgacaatgcagaatcatttgcgatgattcgaggcggtcatatcgatttagccatacttggtggcatggaagtctcagaaacaggggacttagcgaattatatgattccaggcaaacttgttaaaggtatgggcggcgcgatggatttagtagtcggagcacaaaaagtagttgtcattatggatcatatgaataaacatggtaattccaaaataaaatcacaatgtgaattaccgttaacaggtgctggtgtagtcaatacgttgattacagatttagctgttttccaatttgaagcgggtgtcatgaaactcgttgaattacaacctgacacaactttagaagatgttgaagcacatacggatgcacattttgaaaatcatttaaagtaggtggcgtaattggtaaaagataaagtaacaattattacaggcgcagcgagtggtattgggctagcgatagcaaaagtatttttagaaaatggtgccaaagtggtgcttgctgatttgaatgaagataaattaattcaagaaacagatgcattgaaatcccagggatatgactgtatgccaataaaagtgaatgtcacagatgaacaagctgtcaaagctatgatcgatcaaacagttgaacaatatggacgcttagatattttatttaataatgcagggttacagcatgttgaaagtatcgaatcattcccaacagaaaagttcagacagatgattgatattatgttgacgggtagttttataggtacaaaatatgcgttacctattatgaaacaacaacaatcaggacgtattttaaatatggcatcaattaatggtgtgattggctttgccggtaaggcggcttataatagcgcgaaacacgggattattggtttaacaaaagtaaccgcattagagaccgctacagaaggtattacagtgaatgctatctgtccaggttatattgatacaccgttagtgcgtaatcaaatggatgatttagctaaagaacgtggtgtggcagtagaacaagtacttgaagacgttttatatcctttaattcctcaaaaacgcttgttagatattaaagatattgctgactatgctttattcttgtgtaacgatagtgcgaaaagtgtcacgggacaagcgattttgatagatggtggttacacggttcaatagtttaaatatattgtgcaattaaatttttatttttaaatcattttcaatgaaaatatgttacgttgaaattaacggaatatagacaaattgaaggtgactgctgatgaaaaacactaacgccaaaaatgaagattggttgcctatcgtaactagtttagggctaacgatactttcagattttttggatgacccgttatatacaaaaataatgacagcgattatgattttagtattgatatatgcgattattagaggcgtcatcaccacgaggtacagcattaaaacggaagacccaaatgtaaaacgtggtttagtattaaagtagattactggctactatttgttcgtaatatgatactttatggatttttagcaacactattttttgtttctatatatttggatggtcaaaccatgtggaaatatttgttagtcatagtaatcatttttgttttatttttagtaatgatatctaagttggaaaagaaaacagaaattataaatcatgaagacgattaaagtgaataggggtggcttatgcgttatatagatgcacaagaacaagcacaattattaaatatggaagaaatcgtagaagcggtggcagactcacttaaagcatattcggaaggtgaaacagacacaccattgcgatattctttaccattcaatgaagccaatcggtatctagtcatgcctgcactttctgatacgctgaaagtagctggtgttaagacggtcaccgtagctccaaataattcaaaaataggtaagcctaccattgttggttccgtaacactttcagattatgaaactggtgaaacattagcagtgttagaaggttcatacttaacgaaaatacgtacaggcgcaatctcgggtgttgctacaaaatatttagcacgtgaacaagctaagacgctatgcgtaattggaacgggtgatcaagcagaaggactgattgaagcggttctcgctgtaagagatattgaacgtattcaattttataatcgtacttatgacaaagcacttaaattttcaaaagatgtcgaacataaacatcatgatttagagttatgtgtatatgaagatgttgaatcagcaatggctgatgcagatgttattgtgactgcaacgaatgccacaacaccagtgtttcagaaacatttatccccaggggtacatgttaatgcagttggttcttttaaacctgatatgcaagaactgccatctcaagctattgcagagtcagataaagtcgtggtggaggctcatgaagcagctatggctgaaacaggtgatttgatcaatccagttaatgaaggtgtgtttgctaaagatggattacatggtgaattagggcatatcgtttcggggaaattagcaggacggttgtctgatgaagaaataaccattttcaaatccgttggtgtcgcaattgtagatatcgttgtggcgaattacttttatcaaaaagcagtaaaacaataaatacagctatattagagagagacagtcttaaaaattcaattaagcccaataactatgacaagatatttgtattttacaggtgtcttgttttttttgtactttcaatatattgtttttaaatctttaatgttgtaacctattaaaagttgcttctatctttatttatagcatttactttataaatgtcattggcatatctcttgaaagagtggttggatttatatgaaaccaacgtattttgtaatgaaagaacaattgactaatttatatttaataagaagattagctgaatttcagttaagaatttctaataagaacaattatttaggcatggcatgggaattaattaatccgattatgcaaattgcggttttttggtttatctttggtttggcacttagaagtaataagatgatggaaggtgttccatttatttactggctaattgttggtattagtatgtggttttttataaacgaaggtgtcttagaaggtagtaaatctatcatatcaaagtttaatcaagtagctaaaatgaattttccactttcgataattccaagttatgtcgttttcagtaaattttatgggcatctatttttattaatcattgttatgattatttgttttattggaggatatcatccctctatatatacgttacaattacttctatacttagtttatgcacttattttaacaaatgctattgcattagtagcatccacattaagtatattagttcgagacatccatttaattttacaagctttaatgagaatggttttctttgtttcttcgatattatatttacctaataacgacatagtgatgttcgttatgaaattaaatcccatttattttctagcagaaggatatagagcagcaatattacatcatgaatggtattttattacccattggcatttaacaatatataatattgtgcttgttattttgctttatatattgggttcaatcatacatatgcattttagagatagatttgctgattttatgtaattaataatgaaatggattataaaattttaaataaacacccctaaagttgatatgattttcaactttaggggtgtttcgtcattctttgccataccatgtgcctggtccataaagtaagccataacgaagcacaacactattttcgatacgtgcagtttcagtttctaaaacttctacgccatccactgtaatcttacggtcgccagttgattgagtatccagtggtgtctcctctgtagctagagtatcgccaccttcataagtaaaggcaatactttgggattgcatttgttttacattgttttttaacgctgcttcaacaaggtttttcgtaccttcaattcttacttttgtatttgcggatgtatctacattttttaaatctgtaatttcattcatgataatgtctgatttataatctgaaattgctgcttcgactgtatcatattttaaaatatctccaatttaagcttcgacgcctgcatctagaagtttctttttaccttgttgcgaagttgtaaagccagcgacctcatagccttcttgtaataatctttgtgttaatttagtaccaattaatccagtagcacctgttacgaatacttttgtgatagtaaagtcctccaattttttgctttctataattattttccgttttaggtatatatcaaacgtaataaatgtgaacattcattggagttttcatagagtgattatattttcaacgaatttaaggatatagtatgatacttatattaaataaatatcgatataaggaagttatatatgaaatcaattctactaataggtcaatcaaatatggcgggacgtggatttatagatgaagtaccgcccatcattgatgaacggatgatgatgttaagaaatggtaagtggcaaatgatggaggagccgattcacagtgatcgctcagtcgctggcattggtccagctgcttcttttgcaaaattgtggttggataaacacccaaatgaaacgattggtttaattccgtgcgctgacggtggtacaacgattgatgattgggcaccggatcaaatactgacacgacacgcacttgcagaggcgacatttgctcaagaaacgagtgaaatcattgggatattgtggcatcaaggtgagagtgatagcttaaatcaacgctaccaagactatgacaagaaattgaaaacgttgatcaattattttagagaacagttaaatattcctgaagtaccatttattgtcggattattacctgactttttaggcaaagcagcatttggtcaaagtgcagtagaatatgcacaaatcaatgaggcactcaaacgtgttacgcaattaacaacaaattcttattacgtcacggcacaagatattacggctaatccagatgctattcatatcaatgccaactcacaacgcttattgggcatgcgttattttgccgctttctcgagacaaacacacatcaatcagccattaccggaagaaaaagaggcagagactatactctataaaacgcaatatacgaaaaatgaacagatgtatatgcttgtttcgaagttttcaaagaatgaaatcacatatgaagcatttattgagggcatgggtaaactttaatcataatgcatttcctgggaaatgatctaattctaaggcttcacagattaaaatcactaacttatttccgtttagggtaaatagagtagtggataataatctagtgaggtgaagaaaatgtctaatatttcaatcaaacgtgtagcaatcactggtgttattggtggactgttagctggtgctgtaaaaatgggctgggaaggtttggtaccgccacgtacacctgaacgagatgaagaaccaccgcctgtcacaatgatgaaggtattcaatgtaccagataaaatacggcatgcatcatatgtatataatgataatgaagtgccattagcggtgatgggtatccattatggattttctgtaacaaatgcgacactgtatgcgttattaagcgagcaatctgaatctgttacggcttggaaaggtggcttgtttggcataggtgtgcatgtgttattccatgaatttgtcttaccgaaacttaaacttacgccagaacgtgacgaactgccacccgaagaacatttctccgaattgctaggtcatatggtgtggatgtatacaattgacttggtgagaacatcagtaaaataatttaaaatataaaacaacgtcccccttaatgagacacgattacgtgcatgtttaagggggatattatttgtgaaatcaatcgatgcgtccgttcgtaattgttgtaaggccttcgttaatgtcaaaatatttagcattaacttttgaaacacccattgagtttaaacgagtacgatgcctgtttaaatattgttgtgcattgtcgtaagtatcaaaagcgtaaataccaccagcttcttgttcagattcattttctgtccaaattttccacaaaaatcctggttcatcattaattgactttgctaaatcttcaaattgttgtgccatggcttctccaaaaggaccttctaatggaaaatcaacttgtaaaatagtgaccatacttcaacatccttccaatggttatatttataggtctatcatacgcgcaattttaaaaggaaggtaccgacaaacattgaaaagtgttggataaatcttatccatgttcattggataacaagcattgtgagatagtggctttggatttaattcacgaataaaagggaacataaagtgtagtaagcaaatgtgaggaggaaaataatggattatacacaattaggtaattcaggattatcagtatctaaatatgcactaggcagtattccatttacaggtacaaatggatttgaaaatgcaggcggtatgtctcaagacatgaccaatcatatgattgattatgctttagatcaaggtatcaatcagtttgatactgcgaatttgtattctaaaggcgattccgagattgcattaggcaaagcgattagagataaacgacatcagatggtgattagtagtaagactggatttcaattaacggataatcctaacgatggtggtgcagggcgtgtaaatattgagcattctatagatgaatccttacagcgcttgaacacggactacattgatttgtattatacacatttatgggatggtcagacacctgtagaagagacgattcaagtgatgaatgatttaattcaaaaaggtaagattcgttattggggtgtatctaattatagcggatgggctttagcgaagacgcacaccttggcagttgcaaatcatatggcgccacctattgcgcaacaaatatattacacacctgaatctagagaagcggaatacgagttactaccagccggtaaggaattaggtgtcggtaacagtatttggtctccgttaggtgaagggcttttaactggaaagattaaccgacaacaggctggtgaaccgggtactagacaaggtgacggttgggcagaaccatacgtcaaagatacagcgttattttatgatttgatagatacgttacaagaaattgcaacgcaacatcaagtgtcagttgctcaagtcactttggcatggttaagagatcgacctaatgttgattcgcttgtattagctgcgagaacgaaagcgcagttgcaagataatattgcttcttataatttacagctgacaagcaatgaaattaagacaattacggaattaactacaccagaaccgatttatccattatggcatcgcgcgatgaacgcttatgacaaagcttctgattctgaaaagacttatttagaagaatataatcgtttgatggaaagaaaagacacgttgctataatttgaagtatttgtcatttttaaagcgattgaagataaagtatgaaaaaactgtcaacaaagtctgagactttatcgacagtcttaagcgtctgggacaaaaataaatgtctcggacgccttttcatttaggcagtacatgactgaactgaagatgtaaagtcttactgctttaaagaactgctttttctatttatgaaaatgagtagttcttatgcataaaaatgctagtgagacttatgcatgagcttcagctcaggaaaactttcaatcctagtcatccttgccttgattgtatagatgggacttcgaaatctcaattaaaaaatttgatttctgtcccatttccttttagcgttaaaacaaaccaataatagcattcaagagtagtaccataatcagaccacaaataccgacaatggattgtacaatcgtaatcgttttaaatgtttctcccatggacataccaaaggattctttgactaaccagaagccaccatgatttacgtagttaaagaataaagagccagaaccaatagcaatcgttaataattctttattgatacttggatctgcttgaatcaatgggtaaagtaaattggttgcgccaacaataccaacggttgcggaacctgttgatatagataataatgcagcaacgacccatcccattaataatgcagataatgagaaattgtcggcaaggtgaacaattgccgtacctacgccagaatcttcaaggacttgaccgaatgcgccaccacccgcaatgattagcatgataccggcgataggtttcaaactgctacctaaagcatctcgaattttttgtgtgtcgcgatgttttaaatagccgagaacgataatggcataaagcacacccacaaacatggcgatgattccaaatgaaattgaagcacataatgaatgggttaatatgttaggtgttgtgccagttattcgcgcacttagagaaaaggccatgtcaattcaagaggatacaatggatagtatagacagaaaattacctggattatctgaaagagaacgcaaaatcatttcaaaacatacaaaaagcattataaaccaaatgttgaaagatcctataaaacaagctaaagaattgagtagtg

SEQ ID NO: 34 - DNA, 59143 bp, Staphylococcus saprophyticus
ttattaaatgaagcacataatcaataattccaaacgaatttgaagtattttaatacaaaatgcacttactcgttatctttacacaaaagtagaatgaacattctatatatttttagttctaagtagaatgaacattctatctataaaaggaggttcctattaatgaaattttcaaaacttgtattccctggtattgctatgatcgcaacgacctatggattaggccgttttagttttggtctctttttaccagacattactaatgatttatctttatctgcatctcaagctggtctaatttcgtctttattttatttagcgtattgttttacaatcgtttgttcaactctacagacagatacgattggtccaaaacgtatgataatacttgctggcatctctgtagtcattggtttgattactattggcgtatcaagcaatgcaatcattctatctatcggtgttatttttacaggtgcaagcaccggtctcgtttctcctccgtatggctataccatttcgttgtggattaatcttcaagatcaaggtaaagcaaatactttgattaattcaggaacgagtatgggtttaatgtttactggtataacagcaatgcttgtatttttagattggcgtgatacttatttaatatatgctttaattgcattggtcgttttattttggaactatatcgtcataccgaagcttcaaaaagatattaaaattcatacaggtagtcttaatattagagatatttctgcgagcacacgtatcgtcactgcctctacactgctcggtatatctactgcaccatttggactttctcaaaacccattgtccaattaacaggcaattattcagatatagcactttctattttttggattttaattggcatatttggtgtagttggtggtatttctggttcaattatcgataaaaaagggattcacttcgcgtttaattttggcgttattgcattagcatgcgctagtgtattattagcatacacgccaagcatttggttactaccatttattgcgtcatcattattcggcctgagttatattttcttaaccggtgttttactggtttggggaatcaaactgtttgtcaaaaatgcttctcttggcataggcatacctttcttacttctagcggttggacaagtcataggttcatctatcgctggtattgtaattgatatactaaattatgaatatagctttatcatttttggcattatcggactgattccattactcatttatcctaaagtagaggttacagaaaacaaaataccgaaaggtcgttatagtaaattacaaaaaactaactcagatatacttaacgatacttacgcacaacatcaaacttcaaactcaaataatgataaatataaccatatataaaaaaggaataagcctgaaatcaatgattctaaattgatttccgcttattcccaacttattcctatatgcatttcatttctttttgaaatttatactattaacctaatgcgtttaatgattgttctagatcctcgactaaatcttttgtatcttcaatacctactgataaacgtactaatccgtcggcgatgccttctttttcacgaatatctttaggaattgaagcatgtgtcattaatgcaggtactgaaattaaactttcaacagcacctaaactctcagctaaagtgaaataatgtgattcactgattacttttttagcactttctatgtcagcgacttcaaatgcgacaacacctgtatggccctcagattgtgcttcgtgaatatcatgatttaaatggtccgagatacttggatggaatacctgtttcactgctgaatgttgttgtaacatatcaatgatagcaagtgtattacgttgaacctgttccatgcgtaatccaagtgtttttatgccacgaatcagtaaataactatcttgaggtccaagcacaccaccagttgagttctgaataaatcctaaacgttcagctaattcagcgtcacttgttgcaactaatccggcaacaacatcgctatgaccaccaatatattttgtggctgaatgtaaaacaatatcaatgcccaatgttaatggattttggaaatatggcgtcataaatgtattatcaacaaccgaaattaaatgatgctttttagcaatttctgctgattttttaatatcagtgacacgtaataaaggattagacggcgtttcaatgtataacattttcgtttcaggtttaatatattgttcaacagcttctatatttgtcgtatcgataaactcagcatcaataccaaacctattaaacacttttgttaaagctctataagtaccaccatatacatctgaattgatgagtaaatggtcacctttatctaataacataataactgctgaaatagctgccataccagaaccaaatgcaaagccactttcaccttgctctaaatctgcaattaaaccctctaaagcactgcgtgttggatttgccgaacgagaatattcatatccctgtctcatgtcgccaataccatcttgcatatacgtacttgtttgataaattggcgttgtaactgcacctgtatatggatctgttgtttgtccaccatgaattaattgtgtttttttattcatttgattgtctccttataatttaaaatttgttttgacatatatcggtcactgccatctggaaaaatggttacaatgacacctttattaatatgttttttaatttctagagcgccttgcaatgctgctccggaagaactacctactaaaagaccttcttgtcttgctaataatttaacattttgaaaagcggcatcatcactcacttttataatatctgacaccaatgctttaggtagaaaagatggccatttttctgaaccgatcccttcaatatcatgactatgcgcattaccgccacttaaaatagatccttctggttctacgatgacactttcggtatgatatgttgctgctaaatgttcagcaacacctgtaaaagtccctcctgaaccaacaccacctacaaaataatcaatatctttaagcttatctgttatttcttttcctattgtagatttataggtctcaggattgcgataagattcgaattgatttaaataatacgcaccagtttgcagttcataatcacgtgcggccttttgtgcacctgccatgcctaaagtttgatctgttctgatgacttcagcacctaacgcttttataattgatatcttttcttcagaaaaaccttcaggtgcaaaaatcacagcactgacgccgtaatgattagcagcaattgcaacaccaattcctgtattccctgcagatgcctctacaacgacatcgcctttttggattatattctctcttattgctgtttcgattaaatgttttcctaatcgatctttcacactaccaccaggattatactgttctaacttggcataaatttgtacatctttattactaaatgactccaacaatactaatggcgtatttccaattaaatcaaaagcaatcattatttccctccatagtgcctttctccccacaataccttactataccgataagaattataaatccttttcttcatatttgcaatcatttcattttcaagtcaataaagtataataatctaattcctactttttcagtaagcatacttgaaatagccaattagctcttgtatagttgtaattatcagaaaatttagaaattatagggaggctttatcatatgactcaaaacccttggcatttagatactttatctattcacggcgggcaagtagtagatgatttttcaaaagcacgtgctgtaccaatttatcagacatctagttatgtgtttgataatactgaacatgcgagaaagttatttgctttagaggaagatggcaatatttatacaagaattatgaaccctacacaaaatgtttttgaagaacggattgcagccttagaaggtggtgtaggtgctttagctacatcttctggacaagcagccatacatttagcacttttaaatattgtagaaagtggcgatgaaattgttgcttcgtcaaatttatatggaggtacctataaccttttaaatattacctttaaaaaactaggtattaaagtccattttgtagatcctagtcatccagacaatttcaaaaatgcaataacagataaaacaaaagcagtatatgctgaaaccattgggaacccacgcattgatgtgttagatattgaagctgtagccgatatcgcacacaatcataacattcctttgattgttgataacacattcccaacaccttacttattgcgtccttttgaatttggagcagatatcatagtacattcagccactaaattcattggtggccatggtacttccattggtggcgtgatcgttgatagtggaaaattcaattgggataatggaaaattcccaggtttagtagaacctgatgaaagttatcatggtatttcttatgcaaaagatgttggcgaagctgcctatattaccaaagcacgtgtacagttgttacgtgatttaggttctgcagtatcaccctttaatgtccatgaattcttaattggtttagaaacactacacttacgcttagaacgacactctgaaaatgctttacgtgtcgcacaatatctagaacaacatccaaaagtaacttgggtcaactatccaggtttaaaaaataacgcttatcatcaactcgctcaaaaatatttacctgatggccaaggtgctatattgacctttggcatagatggcacggtagacgatatcgccaaatttgttgacggtttaaatctattttcccacttagcgaatgtaggtgattcaaaatcattaatcattcatccagctagtactacacatttacaattatcaccagaagatcaaaaagcttccggcgtagtaccagaactagttagattgtctgtaggtaccgaaaacattaatgatattattgctgatctcgataacggttttaaagaatcacttggaaattaatgttaaaaatttccttagtgattcttatgcaaaagattttcttttgtattcattaatttcacttggaaattaatgttacgaatttccttagtgattcttatgcaatattactacgtttatgatgtaactttaaagtgtgacatcacatatactcataaaaaaggcagggccatatcactatggccctgccttttttacacgtcccagaacacttacctcacacaaaccgaagcctaacctcagtgtaatttcctacaaccttctattcgtgctaaccatctctgactaatttaaaaatctagatattaataaaggttccagatctttattctaatttagtttatccggagtgagactacgaaatctctattagcatattcaatttctgtcacgttctcctatatattatttgtttacatgatataaacccgttaaaacatttgcctctaaattacttattgttacatttaatgtgctattttgaattaaataatgtttttgtgcataattttcaatgcttgatttataaggtagcttactttgggtaacaccgccacccaatacaatgttattaatattaaaaatactgaatagatttgtacatagttgttgtgttaatatcaaaacttcatctatcatttcagttatctcactatgcgcttgatggagatacatttctatagcttctctagtacttacatgcttatttaaaatgtgactcgcttttctactgatcgctaaacctgatatttcattttccacacaaacatattgtttacaaaccggacattggtaatcactatcgccttttataatggtatgaccaatttcaccaaagttcccattaacaccagaaacaagttccccttttcttatataggccatacctacacccgtactaatagttaaatatataaaatcctcagtttgatgtttcatatattgatgctccgctaaaataaacgcatccactgttttaacattttctgagagttgatttaggtgcaatattgcatttctgatattcatttcactaccattgacggtgatcccttttttcttggttatttggatattcacgtcgaatgatatacaccatgctttaattttatttatataatcagtgacttctgccttcgttaaatgaaaagtttttcctatggcttcacttgtaagtggttgttgatacatgagtaattgataacccaacttgattaatagttcactttctttattggtaaaatcagttacaattgtttctatttgttgcatactatataaggactgattcaatttataccctcgtccttttacacttacaatgagatcatctaagatttcactattaatatattgaatatcatttctagctgttcgattagaaacatttaagtaccttccaatttcatctgcatttaaaaattgattacgattgattaacattaatctgatgagctttacatgtctttctagcatcattacacctcccatgctcatatacttcacttctattcatcgctatatttaagtatattgtagccattaccggattgataaacaagataaccatttattttaaatataaaaaacacgcattcaaaagaaaatatctaatgaatgcgtgtttgaatgttttaatcgctattgttgtgctgtatgaatcgtttgtctaatatattcatatgcttctttaagttcgcgttcttcttctttgtctaatgttatcgcaaatctttgaacaataccctttttatctattaatgttggtaaactaaatgcaccatcttctaagccatattctgaactcagggaagtcaatggtgtaattgttctctgatccaatgcaatggactgtatcaaaaatgatgtcacttttgatatcgctgcgttggtccaccctttttggtaaaaaacatccatcgacacttcgttgataatggacgatatgtgtgacttatcaattgctggacggtcacttaatgcctcaaattccgatagttccataccatgaatatgcactttactccacacggggattgcatgttgaccatgttccccaatgacaaaagcttccacattatttggatcaatttgataatgatcggctataattgttttaaatcttgatgtctctagagccgtacccgtaccaataattttatgggctgggtaatctatttgatttgcaaagtaaaccatagaatctacaggattagatatcagaatcacaaccgcctcttgcgtcacttcagctatttgggacattatgcccttaatgatgtcgtgatttccttgcgctaataatgtacggtcaccattatttttatcggttgcttcactcgcagctatgacgataaagtctgcatccgttaagtcttgatagacaccgctacgaatcttgatatgtgcagtatttatcagtccttgcgagtgaatatggtcaagtgcttcaccacttgccacgtccgctctatcatcaattaaaataatctctgaaaacaaattcagttgctgtacatctgtaagtacttgcgtacccacttttcctaaaccaataatacctagcttagacataatcgaatcaccttcctcttcaatctatatattacatgattatttatttttcatacggaataacatcttgtccatatttatcagttataaatttcttcatctctttagattgtaaaactttcataagttctttgaattttttatcgtttttatgtccttcttgtacggcaacaatattcgcaaatggtgatgattttccttctatagcaattgcatctttatgtggtgttagaccattatcaatcgcataattagaattcattatcactgctgcgccttctttactattataagttttaggtaagaattccgcaccttgcttgttattaaatttcaaatcttttttattttctacaatgtcatcaaacttagcatcttcaatactgacaccttttttaattttgattaagcctttatcaacaaagaatgacaagaaacgaccttcttcagcaggattgtttgatacataaatggtagaacctttagggatatctttaatgtctttatattttttactataaacgcccatcggtgtcgtgaacactttcccggcttcttctattttataattatggtctttcttttctgctttaagatacggtgtatgttgaaatgcattcgcatcaacatctcctttatctaataatttattaggaaccttataatcattaactgtttttatttttaaatcatagcctttctttttcatttcttcttttgcatgttcaagtacgacgccatggggcgctggcgaagcagcaatcgtaatttccttatcctctttttcaccattcgatttaccacatgctgctagtataatcgttaacacaaacaatgatcctaaaataaaccattttctcataatactttcactccttaaaaatttgtttcaacgtacttatatgtataaaaaaactttctcttaataaatcaagagaaagtttgcactttctctcatcttcaaaagttaaataactttttgtgacttagcaccatttcgaaaaatcgacggttgctgggtttcatcgggcacatccctccaccactcttgataagagtcaatcatatttatgtttagtggtttaatcctagcattatgctcaagattagtcaatgagtttttagaaaattctaaacactaacacgataaaatatacctgtccttcacaaagaagacaggtatatcactaagaattatgtaaattacatgataatcatgaaaatatacgctaataaattattcaaagcatgtaacgcaatggctacagctaaactacgctgcgatttcatatatacatatacaataccaactgctatggcaagatacatcacaatttctaatggagatttagcttctgttacatgtaaagatgcaaacacaataattgaaataacagacataacatagaaatttaatttctttcctaattcgccaataattaaatgtctaaataaaaattcttctgtcattggtgcaataattacaattgagaaaaaagttaatatggttgatacaggcgtagcaaacatttcctccaccattttgtcattttgtgtttcttcaaatttccaatgttctggtgcgaatgcatttactaaatatggataaatttctttaaacactataataacgataaatgtaatgacaatgagtttccagtgttgcttaatattttgtagcccctgtttccacgattgtctaaatgaatgtctatggaataaaatccataacgcgaatataattataaaggcaatcatttccattaatatgcctggcgtacctgaaaagttagcattaaagttagcgttatttttcccttgcgtttcattgattccaatcatgattgttaagatgactatagataaacaaaaattacctatcaaataaataaacggtagtagaaaatctttcccttgcatatctttccactgatacttatgatcatttttaaacgacattggaacccctccatgtttgtaattagtgaacacttattacattgcacaaattttattgttttcaaatatatatttaaaaataaaatatactgtcccaactacatctattgaattatttgaaaattattttcatatgcgtatatgcccctcaaatgtggtatatatacatcaattaacaaatcaacacacatagcgtataaggagttgtattcaatgcgtatattagtattaggtgctggcggtatcggaggctattttggaggcagattagccgaaagcggacagaacgtgacattcttagtaagacccaaacgcaagtcatttttagaaagaaatggattagccatccacagtgagcagggagattatcatttcaatcctcaactcattacaaaagacgatcgcgtagcgcctttcgatgttattttactttcttctaaatcctatcatttagagcaagccatgacagatttgaaaccatttgtcgatggtcatactgccatcattccattattaaacggcgtcgcacatattccacaattacaatctatctttggtaaagacaaagttatgggtggctattgtgtgatagaaacaacattagatagtatgggagaaatcatacaaacaagcccttttgataaactcttttttggagaactagatggaagtaaaagtgaacgcgcacaaaaaattgcacaagcattttctgaaacaaaggcagaattcaaattaagcacttcaatcgaacaaggcatgtggcacaaatatttaatgattactgtgttatccagtatcacaacattaatgcatgcgcctattggtcctattcgagacagtgatggtggcattaacttcgttcgctctttatacaatgaagtcgcttcgataatgcgtgcacatcgagcgccactcgcagacgatattgtatcacaatatatgacatcatttaatcagttatcataccattttaagacttctatgcaacgtgacatggaaaaaggattaaatattgaaacaggtcacttacaaggttatttattaaacttagccgatacgtaccaaattgacgccccattacttaaatgcgtctaccaaaaccataaagtctataaagaaatgcttaaataatataaacagatcacaaatctgaaatacaacagcgcatgtcatctttattatgagatgacatgcgctgtttaaagttaagtcgataaatgcaatattattttagttttgacatatattgataagctgttacgccatatcgatatttaaataccttatttaaatgcgctaaatctacgaaagcacattctgctatagcaagatagtcatgctgctctaaccaattttgaacgcttttcaaatcttccacaatcgttcgtcttgaaacagatacggtggtcgcaagcacttgtgatgatgtcggcgtattggcttcaagtaattttaacgttatatataacaagtgctcttcttttgcataatgtattgtatgcgttgtcgatttaggtgcaaagcgctttaactgttctggtgttgtggttattttgaccccctcttgcttagtcctttgaataattaaacctaggttacttgccatatcttcaatgtattcaagatcgtactgtatcgttctttctgtaacattaaagtgcgttgctaaatgatgaatttgcacaaaagtttcacattcaagtatgaacattaaaatatgatactgtcgcttacttaacatattagcaacctcctcgcctctttattgtaaacgctttctaaagatgatagatgtgtaatctctttcgtctttaaatgcgaaaagttgcacataaaataaaaaaatcattatatttttaaattataaagttcaaagtacatatatgatatcgttttataaaaaagcccggacataactaaatgtctcggactcaccttatttaggcaatcatatattctattgaaaatacatcgctatcacttttaaaaatgctattcttcagactgcctaatcatccttgtcagtatatataacaaggcaatcgttttatcataatactttcactaaactttctttcaacgttaaacttcacgaatcatatttaaaaatctttgtagttcagcgctttgtggatgattaaagatttgctctggaggcccagattctccaattacaccatcatgtataaatacaatattgttagatacttctttagcaaatcgcatttcatgcgtcacgataatcattgtcataccttcattagctaggtccttgatgacacgaagcacatcattaacgagttctggatctaacgcagacgtaggttcatcaaacagcattacttttggattcatggctaaagctctagcaattgctacacgttgctgttgccctccagataaagcattcggtctttgatcttttacagcagttaaatctactttttccaataaagctaatgcttgttgctttgcttcatcttttttcgtttttttaacagtaatgagaccttccattacattttctaatgccgttttatgtgggaataaattataactttgaaataccatgcccgactgtttacggacttttatctgtgatttcttgtctgcattgctataagtctctccattaacatacacagcaccttctgtaggcaactctaaagcattaatcattcgcaacaaagtcgtcttacctgaacctgatcgtccaataaatgtcacaacttctccttgattaacgtttaaatcaatccctttgataacttctttatcatcaaatgatttttttatattttttaattcaatcatgagcgataccctctttcaagataagattcatagaagttttgtgcaattgaaatgataaagcaaaccacccagtacataagtgctacaagtagataaatagttaaatactcgtatgtcgttgaagcgacttcttgtgcttttctaaacatttcagctactaatataaatcctaaaagtgatgtatctttaattaaacttaaaaatgtattacctaatgctggtacggatactctaatcgcttgtggcaagataatacgttgaatcgtttgtcgataattcataccgattgaataggccgcttctgtttgacccttaggtatagacataatacctccacgaataatttcagaagcatatgcccctacatttaatgataagccaataattgctgcgataactggtgctaacgtccattgattttcagagttatttgtcaataatctgccgagttcagggatcccgtaaaagataatgaataattgtacaatcatcggtgtacctcggatgattgaaatataaaaacgagcaatccctcttaaaatacggcttgttgaaatgcgcattaacgcagtgagtaacgcaatcactaaacctaacaaaaaggttactaatgtaataggtatagaaaatttcactaatccttcaagcatcggtgcaaatgcttgaccagctgcgtctagtgcatgttgctgttcagtattaagatttagaaacatcttcgccgaaccattttttgcttatttttgctaattcaccattatcttttaattttttcattgctttatttactttttcaattgttgcatcgtcttcttttttactaaatgttaaagcagattgactcttctcagcattaccttcaataattttcacatctgcattaggtttttgttttttataatctaagtatgaaatattgtcattaaatgtaccttcaactctattagattgtaataaatccatagcctgattgaagccatctactttcgttaattctgcacctttagatttagccaatttaccataatttgaagtaaacgtttgagccaatttcttacctttaacatcgtcaaatgattttatatctttgttgtttttgttaacgactaatactgcttctgaatacgtatatggttctgagaatttatatttttctttacgttcatcattaatacctacttggttcgctatcacattaaatctaccagagtctaatccagcaaacatagaatcccattgtgtttctttaaatttaactttgtaacccatttctttagctactgctttcattacatcaatatcataacctgttagtttatcttgtttatcatgatatgagaaaggtgcataggtcccttccgtacctacaacaaatgttttattttcacttgcagttttatttttgttatcgttgtcttttttgtcagaagtaccacaagctgcgagtcccacaactaaaagtaacgtcagtatacctaataatatttttttcatttcgcgccctctattcttattattcttatcggaataaaaatattctatgcctaacccttcattaagtcaataacttttttatccaaatatacatttattttttaattccaattaattaacatataatacaattaagttgattcccttgtttactcctttttttacaataatgaacaaaaaagtacatcttcaaatcttttgaaaatgtactttttcaatgatacttaatatatttatgctttcgaatccatctttttatataaatcgatcatttctgctgccatatctttgaacgtaatagctgtcattaaatggtcctgactgtgaatggttaacagcgacatttttatctcatcaccttgcgcttctttggttaacatatttgtttgaatatgatgtgcctctaataatgaaacttctgcaagttttaatttcttttcagcttcttcaaaagcatttttctttgccgcatagatggcttccattgcatgacttttggcgtcaccactgtatgcaataagtgacatggcaaactctaaactattttccgcttctgacattgaaccacctctattttgtcatcaattgttcagctgtatttaatacattttctccattcatcgttccataatctctcatttcaatgaccgctacaggtatgtctttctcagagcattttttagtatattcgtcttttttaaagcgaacttgtggtcctagtagcaatacatctatattgtcactttcaattttttgatctgcttctgaagtggaaacggcaaaaatatctctatcaagcttttgcttttcagcttctttttgcattttttgtaccaacatacttgtactcattcccgctgcacataccaacatgattgttttttctgccataaaaattcctcctgattaaaagcgtagtttcatcatttaacgttgaatcgatctagctatcatggatactgtatgcctttcacctctgattgccttacttaattcaaaaatattattgactggtgcaagaccgcaataaccagcatcaccaatgtgttgaatatcaacaccacagattttattacgtatcgcaaaatccctaatggtacttggatcagaactttcttggcttgttcctatagcagacataactaaaccttcacgacggtgtactgctttaacaatatttttcaattgttcctcatcaaatcctggtaccgtgccaattgatggtacaagaataatatctgccccagcgtctataaattgatctacatacgtttccgttattacaggttcatctacaccagcgctatgcattttccccgctataataagtcctgtaaaatgctttcgtgtctctgaaatagcgttgacaattttatcattcgttacacctgtcccaggattccctgtcatacatataaaattaatacctaatttttctaatgcctttaccgttttcgaacttgcttgtcgaccttctacaatatttagtttttcttctgacatcgttgcggttttatctacaggttctaaattgacaccaatcggtctacaaacaagacgtctcaattcattgataacctgtttatcttcatctacattaacaactttaggatcaaaggcatctaaaccatttaataaaattaaatctgcgccaaatgcacgagcaagttcagcatttgtaatatctggaatgactggagtacgtgtgaccacattttcagataatacaacacgaccatcacttgctttaatactttgttttaattctgtggctgtcatttcaacgatttcagatgcattcgcacttaataatctttttaccatgagacaaaccccctttgtttagatttcttttgtttcatctgcttctttttgctctagttgcaaattatatttttccatcgttctgtaaaatggataatacaataagatatcaacaatgatacaaaccatttgtgccaatgaaccactaacatgacccgtagctaaaaacccactaataataggtgggattgtccaaggcatcgcagtaccattagttaaatgaacaagcccgcttgccatggcaaaataagtaatcgtcgcattgatcatcggcgccaatataaagggtacaatcagcctaacattgagaacgactggcaaaccaaacaaggtcggttcattaatattaaaaataccaggcatcaatgtcagtggtgccattgttttcgtaattttactcgaacgctttttaaaggctaaaatggcaataacaatcactaagccaatggttgagccaccgccccccataaatacaaaattatctataaaaggttgcgtgatgatatgtggcaaatcgccatgaggattagcttgatatacaatacggttttcatctatattcttaagccatattggctgcataaccgcatttactacatttgcaccatgaatacctacaaaccaaaaggcactatttagtcctactaatataatcgtacctattaaagtacttcccattaaacttaatggcacacctaatgtattaacaataaggtcatgtatgtttccaaaaggaaggttatctaatgctatatagattataagccacaataaaataatgacagctccaggtattaatgcgctaaagcttttcgctactgcaggtggaacttgatcgggcattttaatccttatatttctattaataaaccattgaaatatcaatccggaaaagatccctataattaatgctacaaaaagtccctgacttcccatatacatttgaggtatagcttcttctggtgttttgccaccggtcataacattaggtgttacaactaaaaatgcagccatggaaataattcctgctgaaacaccatccgtatcatactgtcgagcaatactatgtgccacaccaaaacttgcaactaatcccatcaatccaaatgtgccatttactgctttcattaaatagggttgtatgccttgtgcttccaaccattcaatccatcccggtatggcgatgccactaatgacaagaaatagtgatccaatgataatcaatggcatcgcaacgataataccatctcttaatgaaattaaaattttattccatcccaatttagacgcgactggtaacaaatacttttctaatgtgtcattaaaacgactcatatgaacacacctaatccattttcactactaaacgtgccgcttcacctcgtgccaagcggtcaaacccttcattaatatgttctaatggtaatgtatctgttaaaagttcatttactggtaaacgaccttgatgatataagttgatgaaacgtggtatatcacggtcaggaacacaacttcccacatatgacccttttatcgtacgctcttcagcagcgagcgttacttgaggaaatgaaaattggtgtttgggatctggtaaacctgttgtcgttgtcattccacctcgacgtgtgatttgatatgcgacatccatggcaggtactacgcccgccgtttcaaaagcataatccacaccaccttgcgtatattgtttaatatcttctattgtatgtgcttcacctgaattaaatactgctgttgctccaagtgatttagccaatgcaaatttttcttcattaatatctagtgcaataatttcacttgcacctgccaggcgtgcaccaagaattgcgttaaaaccaatgccaccaagcccaacaaccgccacagtactccctgcattaatgcgagctgtattaatgactgcacctatgcccgtaatgactgcacaaccaaaaatcgccaccttttcaaatggaatctttttatctactttgacaattgaatttgtagataccactgcataatctgcaaaacctgatacacctaaatgatgatgcattacctcatcacggtcagattcataacgaaagccaccttctaacatttctcctttttcatttgccgctgcaccattttcacataaggcaggtctgccttcacgacacggaatacaatgtccacaacttggtataaatgtacatacgatatgatcacccacttcaaattccgcaacgttttcacctacttcgataatttctccagctgcttcatgccctaataccattggcattggacgtggtctactgccattaattacagataaatcagagtgacacaaacccactgcgcctatttttataagtacttcatttgattgaggcccttgaagttctaaagtttctattgttaaaggatgactttctgtatatggtgcatctttacccatttcacgcaatactgccgctcttgttttcataacatacactcctcattcactgtagtgatttaaagatactttgataaaatagcaattattcataataaccttccgttgattttctaaagccttcgaattgttcgccatcatgtccaaaccaaatttgagcatttttttcttttgctaatctttgaattttctccactgatttcgtccatccaatagaatcatataaaatacctggtggcttcaatgtatcctctatactttccttagtgtatattgcgtccgatgctaatataatcgttcctaattcagcactctcaatctctagaccaatgatgccccatgcatgaccactaccataatttaaaattcgaacaccatctactagtttcaaattatcttcttcttttttaatcgttctccatttcagattatttttcacccaagcatctatatctgcccaaatataagccccttcttgttggtttcgtgcatatgttttcattgcaccacttaattcatcatcatggacaattatggttgcattcgtaaaatattctaaacaccctgcatgatccaaatgtaaatgtgaagcaataacaaaatcgacttctttaggatctacattaatttgctcgagtctattaggtaaatgacaagcttcatcagcaaagtacggaaaagctttttgtgttgcacttatccatctcccactatctcccatagcgttcggattacaagctgtatcaaaaaggattttagcatctgggtgatctataaacacagtatatatagggaattcatgcatctcgttattggcgttagggtcatctaatgttgcttgattggaattagcaatcatcaaattcttatccatcttcatgcgtccgttatccaaaacatagactttcatacgttcttttttcacattaaccataactacacaccccttttaaaattatataattacattataattgtaaacgtttacaaaaatcaatttttaaattattatttcatttaagatttatactttatgtatttcattaaaaacgatacagactcatttttgattcattaaaaatagtatttaattattacaagacataaaaatgcgccctccaaagttgtcatttttagaatgtctactttgaaggacgcatatgattatttatatctcacttacaatgttccatcttctatgagtgaagtaaaaatttcatcatcaataataacttctacattaggatgtttgtgcaaaatagaagctggcaatgcttctgacacttcgccttctaacaaagcttttattgcttgctgtttatttttaccaaatgctaacaatatgatccgttttgctttcataatagacgacaatcccatagaaatcgcttgcttaggtacgtcttctatattttcaaaatgttgactattcgcattaatggttgaaggtgttaaatcaacaactctcgttacactttcaaaagatgaatatggctcattgaagccaatatgcccattttcaccaatgcctaatatttggatatcagctgaaccgatttcacctaaacgctgttcataaagttcactttctaattcaatattaggcgcatcacctacaggcaaataaatatttttattattccatgtttgattatgattaaataagtgcgcgttcatataaacatgatagctttgattatgttctgcagataaacctacatattcatctaaattaaacgttacgacattggatagatctatttgattcacatttaataacgctgctaatgttttataaacttcgatcatggtattaccagtggctaaacctaatacagcattaggtttggagataacctgtttcagtatttctgttgctacgtattggcttccaatcgtacgattttttaagttgattacattcatcatctcaccaaaactttctataatctattcatcatcctctaattgaataccttacttatcattttctaaaagttcttctacttcgtttttaatggtagtaacatgtggcccatagataacttgtacacgttccctttttgaatcacgccacgtgcttctgtagaagttagcattgttttatcgacagctttatcactgtttaacgttactctcaatctagttgcacaacaatcaacgacatcgatattttcttttccacccagcgcttgaataatcgttttagcacgatcagttgcttcaactgtttctgttacaccttcgtcttcacgaccaggtgttttaaaattaaatttcgtaatgaggtatctaaatatgacgtaatatagcacaaaccaaacgatgccaattggaatgacccataagaaattcgtcttttcattaccttgtagtacaccaaacaataaataatcaatgaaaccaccactaaatgtttgtcccacagtgatattgaaaatgtcagccatcataaatgctagtccatctaaaacggcatggattacgtatagcattggtgcaacaaataagaaactgaattctaaaggctctgtaatacctgttaagaacgatgttaatgctgcagataacattaaaccaccgactacttttttacgttcaggcttcgccgtgtgataaattgctaatgctgcaccgcaaagtccaaacatcattgtgataaatcttccagacatataacgtgaaccgcctgagaaatatttagttacatcaggatcacctagctgtgcaaaaaatatattttgcgttccttgaaccatgtgccctttaacttctaaagaatctcccagtgcggtttgccaaaacggtaagtagaaaatatgatgcaaaccaaatggtcctaataacctcaatataaaaccaaagaaaaacgtaccaataacccctgttttatctactagaccaccgataccaaatatccatccttgtaccgttggccaaataaagaatataaccacacctagcactattgaagaaactgaagtgatgataggtacaaagcgtgacccaccgaagaaacctaaatacgcaggcagtgatattttatgaaatttattatgtaacaaagctgtcataataccggtgataatacctccaaatacacctgtttctacagtttgtattcccaataccatactttgaccttcttctgccaagttgcctttcgccaatgtatctgtgatcgtcaacaaaccattcattgatgcattcataattaaaaacccaagcattgctgctagaccagccgtgccttttatcactttttgctaaacctaatgccacacccaccgcgaaaataaccagtaaattttgaaaaacgatatttcctgctgctgacattaaaataaatatattttgcaagagcgcaatatccaatactggataggctttgattgtattcggattactcaacgcaccaccaatacctaacaataaaccagctgctggtaaaatagctatcggtaacataaatgatttcccaaattgttgtgctttttcaaacaacttactcatatactataacctcctaattaacatcaatatacagtcgaagaaaatattaatcattacaatagaacaatatgaaaaatattttcataaagtgttatcattatctattatatgcatctattaagttatccatatgttgtccaaattcattttagatatatactttcaacttccttcatttcaacgaaagtcacaccttaacttcatttttaaatttgaagataaaaaaacaaccaacaaattaaatttgttggttgtttacaagtagaaacgtcaatctatttcataataaaatgctaacactatctatgcattaaattaagttggcctttacatgttcaattcagtcatctactgactaatcgtaggaaaagagtgtaagacatttcttttgtcccaggctccatcctttttatagtagcattacaaaacctcttcataatacttaacatctaatttaaaaaatatcacccagtgttacagccataattgctttaatagagtgtaatctattttctgattggtcaaaaatgacagcatgttcacctttaaatacgtcatctgaaatttccatttcagttaagccatacgtttcgtaaatttgttgtcctacttgtgtatttacatcatgaaatgcaggtaagcaatgtaatacgataacatctggattcattgtgttgatcagcatctctttgtttacttgataaggtaataattgattgatacgcggttctaataccgattgatcttcacccattgaaaaccaaacatctgtgtatattgcatctgtttgatagattgcttgttgaatatcatctgtaatcaatatatcgctcgatgattcagcagcatatttttgtgccataacttgaatatcttcatccggttgtaacgcttttggtgcggctacatgtatgttcacacctaaaattgcacccgtaataagtaaatcatgtgctacgttatttctagcatcaccgacataagtcaatgttttaccttgtaatgttccccagtgttcttttaatgtgaaaaaatctgcaatcatttgagttgggtgccattcattagtgagcccattccatactggtacacctgcatttttagcaagtgcttctacatctttctgatgatgacctctaaattcaataccatcatacattctacctagaactttggcagtatcttctgaggattctttaactcctaaatgaatatcaccttgcccaaagtattctggataagcgcctaaatcatatgctgctacactaaatgctgaacgcgttctagtagaaggtttttcaaataagaatgccaaatttttcccttttaaatacgggtgtggaataccacgctttttcttttcttttaattcaccagtaaaatcaattaaagtatgtaactcatctgctgaaaaatcacatgtcttcaaaaagtctttacccttgaataatgctagcttgtttaatgctgttgtgtacgccccattttcatcactccaatgttttataagatttatatacataataaaggtatttaaatgatatttcaagtatatttatactaaaaaatgaatattatttaattttatgtacattgacagcttttttcaattttaaaaaaagttaaagtctcttaaacaataacgtcgaaaatctcgtcatttaagcattgaaaatatctgaaaataaacagttgtgaactttaaatttcaagttatgcgttacatatcttttattatcaaaatggttgtatattgggaatgtaatcatttatctcacggaggtgaattattatgtttaaagatattgtagctgtaattaaacaaatcgtagcacaatttgtttcaggcggtttccaagaaaaataaagcatttatttccactccacctcaaaaaattccataatcacccttttaatcagaaatgaattttcgaatcagtcgttgatcgtcaatttgattcaaagcctatgagacaccccttatatttcataggcttttttataaatttcgttatatttcaatatctattcaatttatttaattattacctatgaaaaaagaccatgacatctatagatatcacggccttgttcattatatgttatccatcggattttaagttgcttttttttcgttcaaaataccacgctcttctggtgtttttaaaaaacgagtcataatcgcacttgctacataaagtccaaatataagatacatcataccttgtacgccaatactatcgtagaataaagcgactaatccaggtccagcaaacacacacaaacctgctcctaagttcaatatagccattgccggacctttatcaccatcatgcacaagtgaaggcacaagtgctgatataggaacgaatccagctaaacacattccccataaaaatcctactgttccgacaatgaacacattccctgtaaatatttcaggtataaaatacaagcctaaagtaaatacagcacaaccaatacctccgatataagatattgtatttttccaaccaatcttgtcgcttaatgcaccaaatataagattgaaaataatatttgcaataaaaatcgtaccccaaatatttaaccacgtcgtcgttgcgatacctttcgtagataaatatattggaaggaacaacggaaatgcatattgtgcagcttgattaataattcttacaatacaagcaaccgctacgcgaggttctcgttttaaaattgtaataccagcgcccatctctttcaaatgggttttaaaaccattccctttattctctatttcaaatttatcacggtttacaaatactgctaaaaatgttccaacaatcacccataaaatcgcagtccataaggtgaatatatgaccaaatatttgaatcgccatcgaagaataaaatgaacccagtacactcaaacctcctgtaaatacaaaccaaaaccatcctactgctgcacctaaacgtttctgtggagaacgatatgctacccaaactaaaaatgaataggcaaataatggatacccaaaacctctaatcgcatacgatggtatcattagtccataattcatggatggaagtgctaagcctacaaatatcatgtgaccaataatatacaatagcgttcccaataacattacttttcgtggaccaataatctctactaatacacctgaaaaccaagatccaatagcaatcgttacaccataacaagtagttaatatagcagtttgatgtacagataggccatgatcatgtaagtatggactaatccaggctagctccaagccatcccccatcataaaaatgagtacaccaatatatccccataatagtgtcggtggcatgcccattttagctaactttttattcattcataacacccctatatctataaattttcattcctatgttatttcaaataatatgcgctttctttaaaaccctatgcgttcatttattccaattaaaagaaaacgctttcatttatttctattatcttatttcattttttctattatcgcaaatttattttcgtttcttttcgtttctttgttttaattactattaaaaactgtgtttacaattttaaatttcctacaaacgtttttactcttaaagtatgtttttaaaaataaatgtcattttttaaatgaaataatttatttattggaatttgaatttttacatgaatgcgtttacaatgaataatatttaatcatcatatgactagatgattgttatttttacttagggggattttttaaatgatgttatttgttgcttttagtgctgtcattgtgccttttatttttttagtattactacgtatgtctgcactaaagggtatgattattagtgcgttcattgtcacattcttgggcgtctttgtttggggaatgcaaggccatgtcatatcggcctcactgcttcaaggtactcataaaacacttaccattctctatattttatttggtgcgcttgtgttgcttaatactttgcgacaaactggtgcagttacacgtattaatgaaggattcaaaaaattatcaggagatatgcgtgttcaagttattattgtggcttttttatttggttcattgattgaaggtgcatctggatttggcacacctgcagtggtcacagcaccactcatggtagcactaggtttcagaccgatgatagctgttgttaccgctttgattgctgatagcgttgctgtttcatttggtgccgtgggtacacctgtattagtcggtttaagtacattaaatgacgcagatagttcactgtttcaagctacagctgaacgtattacaacattagatttactaagtggtatttttatacctattatattaattgctactttgattattttctttggcaaaacaaacaaactcaaatctattgttgaaatgattccatggctagcctgtattggtttcatctatgtcgcttcttcatttgcctatgcctttctattcggtcctgaattcgttgcaattctcggttcactcacaggacttatcgtagccgtagtcacagcaagtaaaggttggctactccctaaaaatgaatggaaagacggttttgatgacagttatacacccacaaaatcagaacatgacatgccattattaactgcttggtcaccctatttaatggtcgttatattattattactgacaagaactgtaccactgattaaagatttcactacacaagtgttagatttatcttggaatcaaattctaggctttgaaacaatttcatctgattgggaatttctttattcaccaggcactatcttactgctttctgctttatttgccatcctaatacagagaaaatcgttcaaagatctatcgcaagcaagcgtagaatcgctaaatacgattaaaaccactggaataacattagtagctacacttgtgatggtgcatgtgtttatcaattctggaatcaatacaagtgatttaatcagcatgccagaatatattgctgagaatatgtctaaatacttaggacctatttggctattcgtagcacctttcttaggcgcattaggctcctttattacaggaagtcaaccgtttctacattgacattttcacctattcaattaaatattgctcaatccattggcgcagaaccttataccgtcttggctgcacaaattattggtgcagcagctggtaacatgatttgcgtacacaatgtcgtagctgtatgtgctgtagtgaatatgccaggaaaagaaggcagtgtaattagaaaaacactcggcccagccttactatactgtctcttagttggtttaagtgcttatatcattacctcaatattcttttaatctataaatgtatttttaaaaagactaaccccttactgttgggcttggtccttttatttaacttcataaatactttattataatttaataattacttttgatgataatttagaatctgagcaatttcaaaacatttaggttatataaattcttaatattatcatctttattattattttgataaagtactattaaaatactttttaaaatatggttactacgtggggatgggatatacatatgaaatttgaaagtataacgttatgtacttcagaattagaagaaacgctacaattttatgaggaaactttggaatgtcctgtagaagttattaatcaagatactttcattgttcaaattggtgaaacacaattgcaattttgtaggtctgaagacgttattcaaccttattatcactttgcaattgatattccatacaatcatttttatgacatgaaagagcattatcaaaatatattatttttattaatggaagacgggcaccatacaacttattttgaatcatttgtcgcacacgctatatactttaatgatccatctggaaacatcgtggaattgattgcaagagtatccaacattacagatgaacctgaattttctagaatcagtgaaatcggctttgtatgtaatgagacaaatgctatttaccaagctttatcggattataaaatcgaaacatttgaacacgctcattttgaaccttatgcgttaaactttctaggcgatacatccgatgaaagctatatactactcacacctgaagatagacgctggtcattttctgagaaacattccattgcgtatccaattgatattaagacggaaacattccacttatcgtatgatacgcgtcatcaatggcacttaaagcaatcttaaattattcaaaaatagtaaatataaacgtggaacagaaatccaattttctctaaaaattaaatttctgttccactatttttatatcatcggttatactttatacttttttaggtttcggccaaataaagtagctcagtgtgattaataaatcaatccctaatataactgtccaaattttaataacatgataaagcgctgctacactatcgccttgtcctacaatatttataattaaccacaatagacctgttccaatcaaataggctaaaacatgtcttaaccaacttacaaaataagcttttgcataagcaatacccgttttcttttcaggtaaatttccttcctttaaaacatagtatttaaaacgttcgtctgcccattgaatcatttgttttctaaatgcaattgaaacgccaatatatactgctgctatgccatgagggaccgttgctttggcaccatttaataaatctacactcatcgtaataattaaaatcaaatcaattacaggcgtcattgcaagtaaaatcaaaccaacttgtttcatgcgtaagacatatcttgaaatcaaaactaaaataatgacaattcaaaataataattcagctacaataagtatcattaataccccgttcattatattacctccttaaccaggatttcacttcgctctctattaaatgttcaatatcttcatttatcatctgctcgggatttaacaatttatgtaatgctaatccatccaataatgcatgcattttcattattgctacatattgatttaacgatgtgtcgagtatgtcatgttcttctaaaaatgacatcgatgcttttattaaagtaaaaatttcattccccatggaatctttacctacttcatgtaactcatattgaaaggccaaccagacctccatatccgcatatcgttcttcatcaagcggcatagctttcaacatcgcctgtatgactttatcaagcgggcttagacttccgtcgttatataccgctttaattcttcctctaactttactatctacttcgaccgatactgcttttaacaaatcatgatggtttggataataataacgtatttgtcctggtgtcattcgtgctaactttgcaatatttctaactgtagcacccttagcgccattgcttacgatagattgccatgcatactgtataatttgctgcttctttttctcgtgatctactactttgggcatatatcagaactccctttttaatacaattgtattaattaaaaactaaaaaaatagcctttaaaacttattttatttactttaacacattttaatacacctgtgttaaaacaaagcatttttaaagacgtatcgcaattatttagatacgcctttaaatcaatatcttttattctattacttgcgctttatcactgacaaacttttttaaagttttatttaagccatctttcgcttcttgatcataaccataagtaccgtcttcattagatgtaatatgtttgtctaaaataaatctacctttatgaattgtatctgcacccaattcttttataactggatctaagctatattgaatcgctaatacatgtgcaaatgtaccacctaatgcgagcgggaggactgttttacctgtaaatgcgccacgtggcagtaaatctaaatatgtcttcacgatgcctgaatacgctgctttaaatacaggtgaaacgataattatcccatcagcttcttcaatttttttatgtgttttattaattgattcatttgaaaagttagcggtaatcaatgcttcagcgtctaattgatgtacatgtatgacatctgtctcaatgccttcatcatttaaatatttttcagcatattttactacacctgttaacctagactcaatcttattaccacctgcgataattgctacacttgccatacttattgtcccctttcattgttaaacacgatatatctatatgaagcactttagggtcattgttcgactcgcaactttcccctaaacaacccacgtttaattaataattaagctttaatcttgccactttataatctttctacactctctaccgtatcatcaattataaatgctgtcatagtatacgtcttaaatatcttatctttttactcgtatttataaacacatatcaagattgaggtatattttctgtaatgagaacctgattttccttgtctatataggcacatgtgccagcgataatatcaatatgccacttataaatgcccgctcgtgccatttcatcgcaaaactttggaaaatccgtttcacctgcttgatgacgctgcaatatatcttttaccaacgcaaggtgtgtctgttgtgcaatgggtacagctactttaacactttcatcagtaatttcagctccatcctgatgaatataagatgtttcaccttgttctatattcactgtattaacaatgattcccatatctttaaaagctttaaacaatttcggaaaatctacgcctgtatattgttggtgtgcttgatgaattttatttaatgataacgtcataatcgtacctcttttacgcttatttgcttactctatatcatagctttaaaacttgtatacaacaagtttattaatcaattaatcgcactattgtaattatacacaatatatattttaaaattataaagtttttattaaaagtcttttcacttatcaaaataatttgtcagatgtatacttgttatagtttttctaaaggagtggtatgttatgagtacattttctgtagaagaaaaagtacaaatattatctgatattgtagcaatgaatacagtaaatgataatgaaatcgaggtatgtcaatacttccaaaatttatttgaacaacacggtattaaatcaaccattgataaagttgatgaacgacgcgctaacttaattgccgacattggtgaaggcagtccagtcatcggtgtatctggacatatggatgtcgtatcagaaggtaatcgtgaacaatggtcatatgacccttttaaacttaccgaagacaatggttatttatatggtcgtggtgctgctgatatgaaatctggactcgctgcactcgctattgctcttatcgaaatgcacgatgcacaattattaacaaaaggacgcattaaattcttagctactacaggtgaagagatggaacaacttggttcacaaaatctctacgaaaaaggttacatggatgatgttgacgcactcatcatagccgagccttgtcaagatatgatggtctacgcacataaagggtctatggactatcgtattaaatcacaaggtacttctgcacatagttctatgcctatcttcggtgtaaacgcaattaaacctttaattgaatttattcaagatatcgataacgcatatcaaaaaatatctaaagaaattaaaggtgaatctttagacttcactcatttgctcgatcgaatgaaaccttctctaccagctacatttgctgttgaagaaattgaatccgcattacaagggcttgtcatcactaacacattaatcaagggtggcgttcaagtgaattctgtccctgaagacgctgatgctgatttcaatattcgtacaatcccagaatacaataatgaccaagttaaaaatttatttaataatacaattgaaaaacataatgcaaatggctcaaatttagaaagtgaattatatcttgacttagatcctgtacttactactggtcaaaatagcctaattgacactgctaaaacgattggcaaaacagcatttaataaagattttgtcgctgccccaattggtggtgtgacggatgcttctaatttactacgcggtaaagatgaatctttcccattcttagtatttggtccaggtgaaaaaccacaccaagtagatgaacgtgtagaaaaagcaatgtaccttaaattcattgatttctataaagaactattaatcacttattcaaaaaattattaatggcctgattagcactaagtacgatatccaagccatttataaaaaaacaacgcatatgcgtcattccagcatatgcgttgtttttttattttcaaattaaccattacactatcacaccaattcaatcctacaatgtaaacagctgctgaaaaacactaaccaattgcgttactttaatatgtaccacatcgtttaaaagcagcgctatttcaagcatctaccaattttgtttatactatgacaaagtctttttttaatttttaatatagtgatactttgatttaacgatttcccaggaaattgctattatattatgctcacaacacaatcgttgtcccaatacctttcccagttcttatcctttccacgacatgcgcttcgttacctgctgcgataactactttttgacagccatattcaatggcactgatcgcatcttgtactttaggaatcatccccccatatatttgctcttgttcaatataatttttaatatgctctgaattcaatgtggcctttactttattatctatcatgacacctggtatatcactcaataaatagataggtgcgtttaatgtctgcgctattttgtacgccaacgtatctgcgttaatattatataaatgtctagaggttttatgtctgccgatagacgcaataacaggtatatattcttctgtaagatgatctataactgctgtattaatgttgattggttcgcctacatatccatatttttcgtttaatggttcaacgtcaaatagcttggcatctattccatttaacccaatactttgaatattttcatcattcattttacttacaagctgcggattcacctttccgattaatatctgacttgtaattgacattacttcatctgtagtaaccctcaatccatcttcaaataatgaatcgacgccttgctgctctaacgcttgattgataaaaggccctccaccatgaataataatcggatgcaaatcctgttgctttaactgtgcaatatcatcaatggtagtttcatgtaattcggtcaaggtactaccaccaattttgataactatataattcattgcagtcactccttaagttctgtacgacgcgttgatacgtatatattcatatgataaatcacaaccatatgctgccgcttctccttccccgtttccaacagttgcttcaattaaaatattatctgatgctaattcttcttttaaacgctgttcatcaaaatctacagccatacctttttccaacacactcacttggcataacgaaacatgggttgcgctaggttctatatatcgcgatgcgtatcctatagcagtgacaattcttccgaaattcgcatcttcaccatggacagcggttttcactaaattcgaggagacaatgctcttggcaatttttcttgcttcaacaacatcgtgagcgcccttgacctttacagtaaccaatttagttgccccttcaccatctttagcgatgctcttggcaagatagtggcatacaaaattcaatgcatacacaaacttatgccattcgggatgtaatgcatcaatttgtgtatgttgcgcttgaccatttgccatgcatagcaccatatcatttgtacttgaatcaccatccaccgtaatcatattaaacgattgatcgattgattgttttaggcaataatccaacgtattcgcatcaatattggcatcagtagttataaatcctagcattgttgccatattgggatgtatcatgcctgatccttttgcagtgccacctatcgttactgtggtaccatcgatttcaacctttactgacagatgtttcgtcatcgtatcagttgttaaaatagcttgattgaatgcttcacttttattatattgttcttttaaaacgtgctgcgttgcatattgtattttatccattggcaaaaacgatccaataacacctgtagaggcaacaccaacaagatgttgctcgatatttaattgctcagcaatccaagcttgtgtatccaacgcatcttgcatacctttttctcctgtgcacgcattcgcaatagccgaattcacaataatggcttgtagtgctttatccttattaatactatcttcagttagttttaatggcgcagctttaaattgattcaatgtataaacacctgttgctgtagctggggtcgttgaataaatccaaccaaagtccactttctttcttctcaaaccgcaatgtaaaccaccagcaataaaacctaatggtgaactcacgtcgccttgtaaatctatatttaattggtttaatgtatcaattgtttcaatgtctctcatttcttctctcctttcatcctactttatggataaactggtgattgtagcaatccagtgttttctttccatccatacattaagttcaaattctgaatcgcttgaccacttgcacctttaactaagttatcaatcacagacacgagaatcgctgtttgattctcttcatcaacataaataccgatatcacaataattgctaccgtaaacttccttagtttttggaaattgacctaatgatctaattcttacaaatggtttatcttcataataatctttaaacagattatgtaagtcttcattagtaaaagcatggtttagtttgatataaatggttgataaaatacctcgagtcataggtacgagatgcggtgtaaatgttacttttacttcttgttgggctaataatgataaatattgttcaatttcaggtttatgcttatgctttcctatcgcataggcgcttaaattttcattcatctccgcgaaatgaacatgttgtgccaaagacctaccggcaccggatacacccgtcttcgcatcgatgataatgttatctagctttacaatatctttatctattagcggatgtagtgctaacaatgtagctgttggaaaacatccagggttcgcaattaattgcgttgtttgtgcatttacatttgaccattctgcaatgctataatttgcttcattcaaatattcttgagaagctgccgtttcaccataatacgtttcataagtagctcgattagttaatctaaaatcacccgacaaatcaatgattttaatcctattgctaagcaactgaggaacaatgtgtttactcacatttgaaggtgtcgcaaaaaatatcacgtcgcattcaattccttcactatttaacgtttcatagtgatatgtgagctgttccaaatgtgggaatgtttcctttataggttgatcctgtttagaatgcgaaaagatatattttatatttacattaggatgctgaattaataatcgaattaattcaatggctccatatccactaccgccaacgataccaacttcaatcattcacttcattcctttctgaatattcggaaattttatattaaattttacttttccaaaacttctgttatgacacgaattacttcatcgatttcatctttatcaataacaagtggtggtgtaatccttataatattgccctgtgtttctttacaaagcacacctttatttatcatttgttcacaatagtcctgtgctgctacatttaattctatacctataaacaatcccctacctctcacttccacgatcagttcactttcaatttgttgcaggtgctttaataatctatcgcctaagtctaatgcattttgtactaaatgctcttcattcagcacgtctaatgctgccattgatacagcgcaagctagtggattaccaccaaatgtggaaccatgcgtgcctggggtcaggacactcatcacatcttggttcgctaacactgcggatatcggatataaccctccacctagtgatttacctaataaatatatatctggctctgtattttcccattccattgcgaacatcttacccgttcttccaagccccacttgtatctcgtctgcaattaataacacattatattcgttacagagttgacgtacttcttgtataaaatgtgttggaggaatatttacgcctccctcaccttgtataggttccagaataattgcagttgtttgattattaattaatttttttaattgttctatatctccaaaatctgcgtaatgtatattgtttaataacggtccaaaaccttttttataactatcttgtgatgataatgataatgaacctaacgtacggccatgaaagtttccattcatagcaatgatttctgatgatgattcatcaatatttttaatatcagcgccccatttacgagccatttttatggctgtttccacagcctctgtgccagtattcattggtaaaacattttctttatttgcaagtttacaaatcttttcttcccatttacctaaattatcactatataaagcacgagaaaccattgttattctttggctctgctcttgaaatgcctttatgattttaggatgacaatggccttgattaactaccgaaaatccagaaatacaatctatataacaattgtcttcaatatcccagacttttgcaccacgtcctttagctaaagctaattttaatggactataatttttagaactatatttgtctgtgtgttcatataaatcaagcatcaaaaccctcatttcataatatttattcttaaaaatgaattaatattcataaataatacacttgtcagattaattagtcaaaggttattttgaatttttacactttaaacgaattgaaaatgttgttttaatgggaataaaaaacattgttaaataatttattttaatgaaatttacttttccatagaatatccatgcatttattttgcataaaatgttgtccactgcaatattgcatacgcttattgtctaagtacagtcgcattattatagtcattttctatacataaaaaagatggggcagaaatcaaattgtctcaaaaagatttcaggctcccactccatttaagcatgatcattcaaatgattaactatgtcgctatttatatgaaaaaagcgtctgggagatttaacaatgtcccagacgctatatatatttctactcacagaattaaattattcttcactaatgtgttctgatttacgtttttcacgtaaatccgcacgcatatctttattaatctttttagcacgtttaaagtaaacactttcaaagtaactagacgtacctattttgtagaagattaatgcaataatgataataacaataaaatcataaggataatgaatccagttcatacctttaaattctttactaccgataaatgataagaaggcaagtacaataagatataagataatccacaagctaccgccaatttgttttttggtatttttccaattcattttatattcatagaagaagtaaattggtaatcctagaataataattaaaataacttcggctgttgttggccacatcgcccaatatatcgctaatgaagccatcacaaatgaaaatggtgccataaattttaataagtttgctctaaatggtctatgcattttaggtgccattttacgtagtgaaatcactgtcgttggtcctgttaaatatgccactaacgtagctgttgatattacacttgctaaagtaccccaatcacggaatagcgataccatgaccatacttataattgcattaaatataatggcaacacgaggaatcatatatttttcattcattttccctaaaaatttaggaatatgaccattttgttccatagcgcgtaaaacacgtccagtaacagctacaaatgatacacctgtaccaaatggtgaaacaactgcttccatatatagtaatatagctaaccaatttaatcctaatagaatagccatatcagcaaatggtgagttaaagttaataccactccaaccattttcatgcagcatttcagtaggcattgacgtaataaatgtactttgtagtactatgtacaggattgcacttaaagtcagtgaaatagctataccacgtgcaatgtttttttcaggtttttgaatttcagatcccatattaataattgtctggaatgcgttgaatgaaaaaataatacctgatgctgttgttgcagcaaatataggtgctgaaccgtaaggcataaatgttccaactgaatgaccatagttcccagtgtcaaaaccagaaataattaacatgataatcgttaataaaggcacacctaatttaaatactgaaattaaacttgtgaatgacgtcaataattttactgaccaatagtttaataatgagaagataataataatcacaaatactgcaaataaacctgcgttacttattgtagatccatccattaaaccagacgtaaatttcgcccattcccaaggccatgaactcatatattgtacagctgatactgcttcaataggaatgatagttaccagcgatacccagtttgcccaggcagcaatgaatccaagtaacgaaccatgtgtatattgcgcataattactcataccacctgattgtggaaacatcgttcctatttcaatatagttataagcaattgaacctataactacaaaaccaataatccaagaaataattgcggctggtcctgcaatggaagatgcctcccatgcgccaaataaccaaccagatccaattaatgaacctaatcctagcaatacgagctgtggtaaattaattttactactttcatctttttgtcccataattactcctaatattttctcttttatattcatatcaagaataagtggcttttatacaccttcttgtatatggtgttattatactcgtataacaattcaagtcaaatcaacttttcactaccaataattgtatatttttgtgtttttattcataatattagcatattactgtataaaaacatcgcacaacataagtcactcaagatagtgtcattaatatgctgaaagtagatttattcatgttactcatttattcacataaagtatagtacccaaaaccttctaatttataacatatatgctacaaatacctttaaatcagtaatcacaagactttgaatcgatgcatttaaaaatatttgtaacttttgtaacagttttgtgtatttatactaaaataaagcattatttacaaaaatatctttaaatactttgcaaataatgctttttatgatgttacacaaatatgaatcattgttattttactttattattttaaataaatagatccagtattaagacaaccattaatcctgttacagatgtcgttaataacaacgcacccccatgtcttaaatgtatccttaatagaaatattaaaatattctttgaataaccaaaatgatgcatcattaacatgagtaatggtattactacctacagctgtagctaataccataagcacagggctgacatcaaaagtgggtatcaacggaccaacgatacctgcagcagtaattgctgaaacaacaccttgacccgtcgcaatacggatcagcgctgtaattaaccaagccataataagtggagagatattggtacctttcatgatatctgcaatataatctccaacatgtgcttctaaaatgatttccttaaaagcgccacccgccccgacaatgaatataatagttgcaacaccttttagacctgtttcaaatgatttcatcattgtatccatatctttaccttttctaagtccaaacataacaatcacagtaataataggaatgataagactgatttccgcacttccaataaatgatacgatttcatgtaatatcgtgtcttcggtaataaataaactgagtatggttgatattgaaattagaatagctggtattaatggtacaaataaactcaaaccaaaactaggcatttcactgtctgtaaaattttttcttttttgtaataatggtggtataggataatctatgcgcttcatgaatctcggcaatataatacccgcaataatcacgctaggaataaagacgatcatccccaaaatataaaccattcctatatccgcattgtaagcatctacgagtgctgtaggccctgcttgtggcgggaaaatattgtgtgataaagttgtcgctgcaaccattgtaatcgccaatttcataaatggtgtcttagcttcaacagcaatactgatgactaacggtgctaaaatcataaatgctacttcataaaatacagaaataccaaatacagcaccgatgatgattaaagcccattgaacatatttagcaccaaatctttctataagtgttgaagcgatacgttgtgctgcgccagaatctaccattaatttaccaagtactgcaccaaacccaataattaatgcgagactccctaatgtagatcctaatccttccttaattgtatctaaaattgctaacggcttcatgccattcataaatcctacaagcaccgctgcgaatatgagcgataggatactattaatcttcaatttaatgtttaaaaatagtaatactcctacaccaataacaagcgatatgagcggcaaatgttcccctaaaaatgacaaattcgtgttcccccaatcccttaaaaataatgaaagcgaattcacaattactcattataaattatttatcgcaaaataacaacgttgttattattgtattaatttatgtttcttctttttcacctcattatatacaaaataattaaaaccacatccatcatcacgggggttctccatgaatggatgtggttcatcatctctatttattattatatacttcgaatgcccaatgcttatcttcaagaatttccctatagaatggatcattaccaattactttaatttgatccgctaatgcttcaacttcatctaagtggtgtgtcgttaatataatgagtcgttccctcttcattgtattcaaaaggttatgaatatcaaatctggattttaaatctatacctactgtaggttcatctaaaattaatatttgcggattacttaataaaccgattagaacattcacctttcgtttcgtaccaccagacaaattagaaattgtcatggttctctcatttaaattgagttgacgtgcatactcgtctatcaatacattggataacggtgttttgcatagcgccttaaaacatcgaatattttcattaactgtcatatgttcaaatagtgcaatatcctgtggtacataaccgattttatcttgtctttgcttttttgacagttgttctccaaaataacgtatttcacctttagtcaattgttctaaaccggcaatcattcttaataatgtggatttaccagcgccgttttcacctaataaaacggttaattgcaaattttcaaatgtcatatctagggactcaaagatgcattttttacgatagtgcttgcttaaattttttaattctatcatcttatcactcctataattgtataaagatatataacaccgccatcaataaggcaaatatgactgccataaagagcctatgactgagtgtatttattttgaaaagtaaccatgaaacccctagttcatacacaataataatcactaatgatttcgcaaagaacgtaaatgaaagttgttgttgaaatatgaatgttgttatgccaagtacaagcattaaaatgagtgtagaatcaaaatataagttgtgaaaagtatcaacttactgtattgaaatataaaaagtcttgttaacggaccattttgtttcagcctttgatgcaacacgatttgaacactactaacgaataagataatgccaaacactaggctgattgatatagacgtctcagaattggtatttacgacatggtgaacaatggctgatttgggcgtgtgttgatttaatgtatcggacaccttttctaaggacgtctcttgaccgtcatcatctaaatgtttttttacaatatacggaatttgttgttcatataatgaacgactaatcatttcaaatgtaatatcaccaataaaatcatctcttgcataaagtgtaagtgccaattttaattgattatttttcaatttatcactgtaatctttagggatatgcatcgctgcaaccgcttcttttttactaacactttcatccagatatattgcttcttggtccaacttttcaactttaacaaagtcgttcttctcaatactttgaattaatgtatgtgaagcttgggattgatcctgatcttgaactgcgactggaattttaaaagattgattcagcgatgaataagctgcccatatcaataacaacgtacacgttaaaatagtaaaaaaaatcactaattgcttccactgttttaatataatgataaatataaaggactgtatcatcggcgatacctccaaacaatgattaccaataatataatagctgttatcacaaagctcatatagaaagtaatgggtgtatctaagatataattatttaatataatctctaacatttgattagtgacaaaactaaatggctgcacattaaacatgccattcaataaatgtttgaaatatatcgttggtataatttgaccagaaaatagaataaccataagtgcaagcatgattttcagtacgatattgaaccaacggaaactgatcaaatcaataatggttaaccaacctgtaatcattagaatataataaactaattgaataactacagttggccaattataaggctcaaaagtattgggcaatatctgtatcatgcataagcatcctaacaaggtccacacgccagtataaaatagcgtaaataaacttctaattaatgttagcttttcaaatgaaaaatggtacatatgtaatctggattttaatgccttagcttggttcatttttaaaattgaaaatagtgatagtgcaaaaataaatatggaggctaaataacctgtcactacataatagctcgatgtatcaaatatttgtatcggttgataatcaaatccgcctgtccgatttaaaccggtaaataataaatccgtcaataattgtaacttatcgtccttattggcctctggtgataatgtcgtgtaggttaaccctccacccatcgataacatgaggcgactataaactgaatcagtcaactgattaataactaaacttttatttgacgtttgatcatatgtataaacagctataggtaaattaccatgtttataaaatgtttttgtcatacctttttcaaaaacataatatccctctaatttttgtgctttcaataatttttgcgcttgattttgattgtaacgctgaatacgaatatctttacctagatgtgttccatttcccattgaattgagtatgagctgtgtctccgccgaattatcgtgatcaacaatacctattctaaactttgcatcatcttgattaacgtactgaacgactagtaaggcagttaaaaaagcacacatcatcaaaattaaatagaaaaaaagatgccatttttttaatagaaaagagtggtaaatgcgaaacaattgaattgttttcatttaaccactcctctctccattaatatattacctttttaaatgagttatctttattttttatctttaatatcttttgcgatatcttttacaatatcttcagtgttgttagatatttctcgttgtagttttctaaagtcactatcagacattgtatttaaatcttgtgcatttgcttttttaaatttaatgtcttctttaagttttgtgtcacctttaatattaatcacgaccgtctcattatcgatatctgttgataatgaaagttcttgtttttgtgtattatttttagtgtctgtgtctaatttattattgaaatcaatcgttgttttatcgtagttagcattgatttcaatctgacctttgtcgttacgtttatccccatcttgtgattctgtatttgttaaagttgcatcagacttacggtaaccattatcaaaagttactttgtagttatctttatactgatcgtcttttttagtcgacttacctttcagtgctacttcttggtcatcatctgttgttaatttataatcaatcattaagttatcatcatcaacttgacttgtcccatttaatttcactgttgaaccgtcttcatctttcatcgttaaattacgtttaagaatctgattatcgtcttcccatataactgatttcacacttggaaattctgctttatctgtatcttttacttcttttaatatatcatctaattgttttttatagtctttcgcattaaattgatcttctgcaatcgctttaatatctttgtcttttttagctttttctaatatgtctgttaaaatggcttttgtttcacctttacttacattcattgttacttttttaacatctttatcctcaccattgaccttaattgttacatcgtctttttcaaaattatcatcgtctaatttatctgtaatcacttcactatatttcttgctaatttcatcaattttatcttgagatatttgtgtaccagataacaacgaatttaaatttaatgagtcatttgtaatgccattatttgtcccttcaacactcgatgtttccccagtgatttttttatacacatcgacaagttcattattcttcgctttgtaaacatcatctaaaattggagctgcataatattgattttgcttatcggcagcccattgaaattccccaatttcattatctgcaactgtaggtgttaaagctataactgaatgctctttatccggatcatgtcccaatttaaatcctaacttcgaagcatctgcaacagattttggtatatccgatgatttgagtagtgcttctggtacatctgcacttgcatttaaattaattaaatacgactcatctttcatcttatcttgaaattcaaattcattttcaaacctgtcttcaccatacgctttcatttgctttgctgtttcctgttcacttagtaaatacgtatttttaggtgtgttctttgtgaaataatacgctgctgctcccccaatgccacaaatcagtagtaccccaataacgactgctataacaatcttcactgtcttagacatatcgttctacctccccttaagttttaatttcttttataatagcacaatatatatataattaattaactaattctaaaattctatcaatttttacatcttttttaataataagtattatatttattatttgtataaaaatataattatacccaatgtagtccttcacagtaggttgagcttaaatttttcaaaaataaaaagtagttgccatttttgataatgacaactacttaaatatatttaatcttttctaacttcatcttcccaccataaagcatctttaggatttttcactacatgatcataatcctcttgcgtttcgacatttggataagaacctctgagtgatttgttagaggtagatttaaacattgttatgaagataatgagtccaacgacattaataaacatcaagtaataagatggtgcaatttgttgtcctgtcgtttctactaaagttgaaagtataaatggcgttaaaccaccaaataccgcagcaccaatattataaacaagtgataatgtacgtaacctaacctttgtatggaacatacttggtaataaggatggcataacaccttcaaatgttgacataaataatgcaatgataaacaatccaagtattacaaatggaatcattggaatactcattaaccaaaatgcaagcaccgagaataaactaaatcctgctaaaccaaatataatggtgcgtttgttaccaactttatcactataccaaccaaagaaaaatactgctggtatcataactaacatggttatggtgctcaatatggatcccatagttccacctaagttgattgttgaattcaagaatgatggcatataggaaagtaccatatagttggcaacatttaagaaagctacgcctgcaaaacaaacgacgacgtctttccaataatatttgaaaatatctaaatatgaatattctaattcttcttgttcttctaatgtagattcataagctgggctttcatctaaacttgaacgtaagataataccaataatacctaatggtgcagcaaggatgaatggaattctccagccccaatcagccatttgttgatcacttaataatgaatacatcagccccgctaaaatagcagccataatatttccagcaagtgtaccaatttctaatccactgcctaatttaccgcgtgtcttatcaggagctgtttctgcaatataagtcattgcacctgcgtattccccacctgttgaaaatgactgaatcatacgaacaacaagtaataatataggtgcccaaataccaatttgatcttgtgtaggtaacagcccgagcatcaatgtcgatgctgccataagtaatatcgttgtcgataatacaattttccgtccatatttgtcccctaagtgactgaaaaatataccaccgattggtctcactataaaagcaaaggcaaatactgcaaatgttgaaacaatttgcatctcttgaggtaaattcccaaagaaatttgcacttaatatcacagctaattgtgcatataaaccaaaatcaaaccattctattgcattaccaatccctgtggctacaacaccttttttggcttgatcagaatctactctgttaactttctcttttttaaatttcacaaataaaaacaccccttaaattgtttctatttatataacataacctatgtattaacttataaacacttataagttataatttattattttttaattttcaaaatcaataaattttaaaatgatttcgcgaatttattaaatgccattttaattatagacattcatctaatgccgtatcgtaaacacacacttcaatcttttagtatttatataagtatttaaggcaataagttccaacatgatatctcaaagacgccgcttctttctcaacacgatatgactctgattcacttttgatataatagatttacaaaatgaaacggaggatattttatgaaacaaatatattttaaccatgacggtggcgtcgatgatttaatttctctatttctgttactacaaatggaggatgtatcactcattggtgtgagtgcaattggtgctgatagctatgttgaacctgcagcaagtgcatctcaaaaaatcattaatcgctttagcaagcaaccgattcatgtcgccgcttcgaaacaacgcggaaaaaatccattccctaaagattggcgtatgcatgcattttttatggacgctttacctattttaaacgaagctaatcaaagccattcaaatttacttgaacacgatgcttatgaagatattattgaaaaattacaaaagagtcatgctccagtgactttattatttactggcccattaacggatttagctaaagccgtaacagttgagcctacaattattaataaaattgaacgtttagtatggatgggtggtacatttttagaaaaaggaaatgtcgaagaacctgaacacgatggcactgcagaatggaatgctttttgggatccagaatctgttaaaaccgtctttgatacaaatataaaaatagacatagtcgcattagaaagtacaaatcgtgtaccactgacatgggatattagacaagcttgggcaaacgaacgacattatccaggtgttgatttcttaggagtcagttatgctgctgtacctccattaacacatttccaaacgaattctacttatttcttatgggatgtactaacaactgcatatgtaggtaaacctgaattggtacagcaacattcggtcaatgctagtgtttatacagaagggcctagtcaggggcaaacgtatatagatgatgtacacggcagaacaatttcagtcgtcgatgatgtcgaacacgatgccttctttaaatacattacaaatttagcaaaaaaagttgaacaataacgtgttaaaaagcgcccttttcgttgttacacttcaatactgtgtagtaacgagagggcgcttttgcacttttatatatatatttacgcaacatactagtaactcttttcatccagatattgtttatcaatcacatctttcgtaatacctacaagtctctgacgtgatacttccatgccttttttatcatttaaagcatgatattgtgcctgctcatctttataatgatctaatttatacattttaaaattttgaggagttgcttttaaataaggttccccattttcataatgtgtcaccaatgatttccatttaacattattgatttgtacgcctttaggatttttttctaaattaaaacgtatgttaccacctaatatattcttttcagttcctgtagcttgtccatttagaaaatttcccagggaataagcaacgagtgttttatgattatctttccctttcacccatttaactggctgtatcacatgtggatgtgtgtctaatacgacatctgcacccgcatcagcaaacactttggcatactgttgttgcgtctcattgggtttagtcttaccttcattaccccaatgtgcggagacgataactgcatcacttttttcttttgcgcttgcgatatcttttttgatttgtgccttatcaaaataattgatttgatatggtttttctctaggaatatcatttgttccatatgtataactcagcattgccatttttattccatttttctcaattacaggaatcgtatcatgttgctttggcgaatcaaacgttccgaaataaaacacggacttaaattgcttccaaacgctgatttcattttctaaacctgcagttccttgatctaaagcatgattattagctccattaaccacattaaatccagtatgtactatgttttgtgcgattgcctctggcgtattaaattgtttaaatcctgacaaaccgcgttcatcaccaccaagtggcgactcttgattgatgtatgatacatctgttgattgaacttcatcttttaaattgtcatacattgactcaaaattgaactgtccattatcttgcaaagcatcctgataaacgactggatggattaaattatcgcctactgcataaaaagataacgtttgcgttaatttatctttttcatttaaacaacctacacataaaactaaaaaacacgaaaacaaaaaacacaaaataatcccatatttccacatatttcataacccctatcaatactcattaaattttattataaatttgataagtcaatatatcaatagagttgtaaaatcgaatactattttttataaagaaataaaaaaagacatttttcaatattaaaaaatgtctttcactatatattaaacgtatttagtcacagtttctgttggtaatctataagaaccatgggctggatttttagctttaccaatcgcaacaattagtacgggtacatagcgttctgaatctataccaaatgcatctgcgatttgatcactttcaaatccgccaattggatttgtatcatatccatgcgctttcgcaacaagcataaattgcattgcggctaaactactatcaatcttcacaatgtcattcatttgttcttttggtgcattatcatataatggtatgactttttctaacatttcttgttttacttcttccggcattaaatcatgtttaactgcattaccataaatttcttcggcatttgtttgactcttcatatcaccaaaaataacgaccatagccgctgatgaatcattttgacgtgtgttaaaacgaatgagcggacgtaatgtgtctttaccttcatcactttcgactactaagaatctccacggttgcatattaactgatgatggtgctgtcgttgcttttttaatcatttcatccatttctgctttcggtattttcacttgttcatcaaatacttttacagactttctattcattaaaatttcttcaaaattattatttatcatttgttatttctccttaatcatttttaacaaaatcaaattatactcaatttagctataattacaaatcatttgtttataattaggaacaaaaaatgttttacctcaaacgccccacactatttactttgagtaaaaacaaaaaaagcgagtataaatgaacctcatattaaaatgatggtcatttatactcgtagctttattttataagtaatacttctttaaagcatttggaatatatccatgtaacttacataaatttgatttatgaagttggtttcatttttttaatacctggtttaacaaagcacatcgcaataataccgatgactgccgctactactgcagatataaacattgatgaatatccatatgatgttacaagtatacctgttaacgttggcgctataatcgttgcagagttaacaaagaaatgcgtaataccgccatacgtcccagttttcttcggtgctgtatcaataatgacagaccaataaacagcatttggcaagaatatacaggcattacctagcatcattaggaacattatctagccaatttgattggttgttgggataattaaaaaacaaatcgctgccaaagtcattccaaatatcgctaaacctgatcgtgcaattcttagactgcctgttttcacacgtaaccaatctgataatcttccaccgaaacatgctgtaaaacaagcacctatacagggaagcataccaagataccacaatgagtgaatctcaaaatgatactcgtcttgtaaatattttggtgtccaagttaaaatcaaaaagtttatgtattgaaaaccaaaataaccaaccatattaaagataagtgtcggacttttgaaaaagtgataccatttttcatgtgcattgtgctcagtttcaactgttttttcaccatgaaccgtttcttctgtggatcgaatactttcaatttcttcctgagaaacatgtttattatcttcaggataatcggtaaatactttataccaaataataatccatacgagacctaataaacctaaaattacaaaaagcacgcgccaagttgaaataactaagaaaccagaaacaatcggtgctgtgattaacgcacccagtggtacaccaattaaacctaaagctgataataaaccgcgttctctcggtgctgccaagtttgcattggtcttactgattgtagaaaatattggaccttcagatacaccaaatagtactcttaataagccaaacccagctaatgcagaaccgccaaataaagccatgcctatctcaccagcaaatgccatacctatttcaaataatgaccaaagtgtaccagcaattaaccaaacaaattttggccccctttttatctgctgtaacccctccaaacaatgaactaagcatataaccatagccaaaataacctaatattgatccccaagcgatattatcgaaaccaaattcgttaataatatcttcttgagcataggaaatagcgccacgatcgacatagttgatcattgtcataataataatcatcgtaatgataaaataacgatagtttttcatttttaatttccccacttgtttacaacattggtaaatatagaaaaacttaacgctaaatgaaaacgctgtcaaaaatatttttgattattaaatttacctttattactaataatgtctaaaacccttgctattaaaagaaaaataaagtttttaaaaatagcaaatattcaaaaaattattctactactttcatagacattgtaatatttctctcttgaaaaccaactttttcatataataatttagctttattctgtacatttacatttaacctaacttcaccaatatgctgtcttttaaaaaagtcattaacaaaatatattaactttttagcaacaccctgtcttctataaccttcaaagacatataactcatagataaaaccgtaatcttgttgttcaaggtaatctgtttttttatcaataagcacaaaccctttgcatatgttttcttcaatcaacacataatattttgcaccttgcaatagcaattgacttgacatatcccgcaatgacgcatctgataaatcaaaattcaccatcatcgcttctttgaataactttggtataactttgttaatgagtttcaattcattatctttagcacatcttattgtcatgatattcatcccctgtctttaatatttttatatacatttccaaaactactaactatgctttaatataataaaagtaaataatgtattttacctataagttgaagtcttttgcttttctttatactacataaccgtgctacaatatatgctttagaaataatatatgcttataaataataatatattattattcgtacgttttatgcacataataatcaaaaaaatttgatttcaaagttgaaaagataaaacaaagtttgttaatattttaccttatatagaagatagtgagaaaatttaagtaaaaagagggaacacaatgaagtctatatcagtcatagtgacttattacaattcagaagattatatcgaaagatgtttaataagccttaaaaaacaaagattccaagattttgaactcatcttagtaaatgatggttcaacagatcaatcgaaaccacttgcaacacaaatacttaaagattgggatattccaattaaagcaattgatttaccagaaaatacaggacatgcgcatgctagaaacacgggcttgaaagaagttgaatctccttactttatctttattgattctgatgattatttggcatcctatgcattatcattttatatgaagaaactaaatcaattcgatgcgttaattgcgcctatccatgggttcactttggatatacctcaatacgttgaccaaaatttagtgcgtactcaatatttaaatactaaaacacattctaatcaatttttaagaaagcaaaccgcatgtaatattgttttcaaaactgcaattgcacgtggccataacttacaatttaatgaagacttgaacgtctttgtagattggtcctttattttagaatttattaaatatgccaatggattcgtgcgtgtcagtcgctttcctttctatattaaaggggaaatctatgacccgtttgtgaaaccagcactgtctaaacaagattttggcattacgttcaacgattatgtatatagtttctctgattctgttcaacgtgcgcctttaaaagaaaataaagttttcataaaaaataaaatgaaaaatatttacaaacattcattcgaaccctcatcaagaaaaacccctgagcgttataaacataacagtgaattgcttccaaaagtgacaagagaattaattccgacgcttttcaaaaatgagaaaccactctttatattagagtcattgatgctcatggtgaataaacgtaaatccgcttttaaaataaataaacttagaaaaaaagcacgtttagtaaaaagtatcttgttacgtagaaaaaataaaaatcgtgcattataccaattaacagatagtgaagataaagtgagtccaaatacgattgtatttgaagcatttgctggtaaaaattacagtgatagcccgaaatatatttacgaatatatgctgaaacgccatccgaattatgaatttatatgggtctttaaaaacccttctaaagtacaaattcctggctcagctaaaaaagttaaaaaaggctctaaagcttactatgaagcatattcaaaagctaaatactgggtgtctaacgcgagattaccgctttatctgaataaaaaaccaaaccaagtttatatacaaaattggcacggcacaccattaaaacgattagcaaatgatatgaaagtcattcgtatgccaggaactacaacggataactataaacgtaatttcagagaagaaacaagccgttgggattatttagtgtcaccaaatagatattcttctaaaattttcgagactgcattttggatgaaacctgaacaactacttgaaattggttatcctagaaatgatgtattagttaaccatgcaaatgacaaatcatatatccaagaaattaaagaaaatttaaacttacctgcagataaaaaagtcatcatgtatgcgccaacttggagagatgatgaatttgtgaaaaaaggtaaatatttatttaatctacaaattgatttagataatttacaagcacaacttggcgatgactatgttgtactattgagaatgcattatctcatttctaatgccttagatttacgtggttatgaagattttgccattgatgtttcaaactacagtgatatctctgaattatatttaatttcagattgccttatcacagactattcatccgtcatgtttgattacggtgtattgaaacgtcctcaattcttctttgcttatgatttagataaatacggtcaagatttacgcggattctatttagactatcacaatgatttacctggacctattcaccaagatccataccaattaacagaagatctaaaaaatctagatcaagtttcaatagattacaatgacaaaatcaatcagttttatgatgacttttgttcattagaaaatggacaagcgtctaaagcaatttccgatttaattactaaaaataacaactagcctattaaattagaaataattaggaaaaaaaatactcattctgaaaataaagcgtctgggtcataaatccccaatctcaaaaaagaggactaatcctttgtatggattggtcctctttatatttaaattctaacactttcgatcgtgcatgctttcctaggaaataatgacttcaaatattatatttcgtacttattttcttttttcttaaatgctaataaaacatacaataacatgatgatttgaatcactgtcccaatcaccattgaaatgagcgttaaactactgttgttattttcaaagtttaaaatatgcagtaatgtcgttgcaataatgagttcaaagacgatacccgctgatgatccaatttgatgagctagattgactaatccagaagcgatacctgattgctcattcgtcacttgatatacgcctaaatttgttaatggcgtaaaaataaacccctgcccaaccccaattaaaattaatggcagtataaacattgttatgataggcctccttattattgattaatcattgtatatatctttggcaatgttaaatgcggaccatgcttttggccaaccaacgtagaatgataagtgtgtaattatttctgctacttcttctttggttacaccattttctttacctatttttaaatgcgctgttaattgttcaaaattcccacctgtaatgagcgcagttattgttattaaacttcttttataaggagacagttctgattctctagaccaaacttctccaaataatacgtcatcatttagttcagcaaattttggtgcgaatgatcctaaattatctctacctgcagtttgttttttagccatatatatcactcctaattaatacatttttgaagacaactacagattagtaccatttcagacattcgtctaatgcttaaaataaaagaacgcatgctttataagcatgcgttctttatgaaataaatctactgtggatgattcatttccttaaaccttttgataaagttttttaaaataggtgtttgtattctacttttcttccatactaaaacacaatgtgtgtaaagttctgtttaaatggaataaaagctaaattatctaaatttctattcgatgttacaccttcaattacaacagctgaaccgacattatttcttaccaatgaaaaaatattaaatattaagttatacgttccaatcacttgcaagtcattgactgctatttgactccattctgaaatcattttttgattttctggtcttctagacattaataattttgtttttttcaaatctccaggatgtattgaggattgccctctaaatggagaatcttcagaaacaagcaaaccccaacgctctggtctcggtaaaggtacttgctcatatttttccattgcaatgggttctattaaaatcgcaatatccaataatcctttatcaagacgctcactgatttcactgcctatgccacttacgatatgaaaagtgattaaaggatgttctctcaccatctcttctaatatcatggcaagcgtgtcagaattatccgcttctacacatcctatcgtaatatgtccactcaacgcttgttgttttttattttcaaattcttgttgcgtctgattcgttaatgacaatatctcttctgctctattttttaaaaatatgtctccttctgtaagcataatacctttattttctcgataaaagagctctacccctagttctaattctaagtcatgcatttgtctacttaatgtaggttgcgtaatgtttagtaccgttgccgcttttgaaatcgcatgttcttcagcaactgtccaaaaatatctaagtgttctcaattccattgggtatccctactttgtttatggtttattttactcattataacaaaattaaatgatacttccttgtaatatttgtggtgtataaaagtcattcattcaaccaccatagatttaaccaagtctccccgataaataatatctctcatattacgtaacagcgcgttatgcgtgcgtctgtcgaaaatgaactcgtaaaagctttaagtatcaaaaaaggcaatgttagtcggacgtgcacaaaaaaaactgccaacaaagtctaagcctttgtcggcagtcagagataataacaaatacatgccttacctctatatctatttcatttattttaaaatatcataatcaaacattactttatagtacccgcatctttatcatgtacaccatgacgatagaaatcaatatattctggatctaatggttttttaccacgtatgatgtccgctgctttctcagccatcattaatacaggtgaatgaatgttaccatttgttgtacgtggcataacagatgcgtctacaacacgtagattttccataccatgtactttgaacgtttctggatctacgactgacatttcatctgaagctggccccattctacagctacaagatggatgcaatgctgtttcaccatcgcgttttacccattcaataatttcttcatctgtttgcacttcaggtccaggagagatttctcctccattataagggtctaatgctttttggcctaagatatttctagctactttaattgcttccacccattcacgtttatcttcttctgtagataagtagttaaacacaaaatctggcttaacaaatggatcttttgatttgatttttaaatgtccacgagaatttgagtacattggtcctacatgcacttgataaccatgtgcagctggcgctttcgtaccatcgtatcttaccgcaattggtaagaagtggaacattaagtttggataatctacatcttcatttgaacgtacaaagccaccaccttcgaaatggtttgatgctgcagcacctttacgtccgaaaatccattgtaatcctatgaatggcatttttaatttatttaaacttggttgcattgaaacaggttctttacatgcatgttgcacataaacttctaaatggtcttcaaaattttcaccaacacctggtaagtgaatacgtggttcaatacctaatgaacgtaaatgttctgaatcaccgatacctgataattgtagtaattgcggggagttaattgcaccacctgataggataacctctttcgcatttactgtatgttctctaccatttttcttaaatgtaacacccgttactttgttaccttcaaaatttaatttcgtcacaaatgcacgtgtttgcacttctaaattcttacgtttcatcgctggatgtaaatatgctctagatgcagaaacacgacgaccattatgtacttgactatcaaatggtccaaatccttcttgacggaatccatttacatctggtgttttattataacctgcttcaacacctgcatcgaagaaagcctggaataacggattatcagctggacctcttcttagtttaattggtccgtgatgtccacggaattgatcatcttttgttgcaccgaatgttttttctaaacgtttaaaatacggtaaacaatgtgcgtaatcccatgaatccatgccttcaggcttcgcccatttttcatagtccattgggttacctctttgataaatcataccgttaatcgaacttgaaccacctagaactttaccacgtgcatgaccgactttacgtccatccatatgtggctcaggtgtcgtttcataaatccaatcgtataatttatttccagctggatacattaatgctgcaggcatctgtattaataagtcccatggataatcactacgtccagcttccaatacaagtacgttattcgatacatcttcacttatacggctaccaagtactgaccacagcacttccacccacctataatgatataatcgtatgattgcttcattgtgatactgctctcctaattatatacgttcattctcttattttgaaaatctatattatgctttaccaaaccaattaactggttctgggtttgtattacgtaatatatgtttctctacttgatattcagctagaccttctttaccaagctctctaccaataccagattgtttatagccgccccaaggtgcttgggcaaagtatggatggaaatcattaatccaaactgttcccatcttcaatttattaacgacgcgttcagctttgcctatatcttgtgtaaagacaccgccagccaaaccgtaaatggaatcgttcgcaagttctatggcttctgcttcagttgaaaaaccttcaattgttacaactggtccaaatacttcctcttgaacaattctcatagaagtatcacagtttgtaattacagttggttcaaagaagaacccatcttgtaggtcttcacgttcaggacgtttaccaccaatagcaatcgttgcattttcagcttttgcaatttccatataattttcaattttttctctatgttcagctgaaatcacaggtcccatttccgtttctgagtcaaaaccattacctaatttaatatttttaactctttcaataagggctgcttcgaatttttctttaata

SEQ ID NO: 35 - DNA, 56340 bp, Staphylococcus saprophyticus
ttcaagaatggtacgatgagcacaccgactagcgcaaagaagatacctatgataaatgctgtattaaagccgtcaattgacgcttgttgcgcctgttcagcatattttaaaggatcgatatctttaagactagaagcgggcatattgttattaataatattttgtgtaacggacgttaatagtgctacagctatggatgaagcaacttgtctagctgtattattgaccgctgtcccgtgtgtgcctttttcaaccgttaatgcatccatagcgtttgtagttaaaggcatcatcaaaatggcaataccaaacatacgaatcgcgtagagtacaaggattaatgtaggtgaagtatgatcacttaaaaatccaaatggtatggatgataaagttaaaattgaaaatccgacaaaggctaaacgcttaatgcccacttcgttatatagcgtacccgatatgggtgaaataaagccgagcattaaagcaccagcgagcaaggtcaaaccagattcaaaaggtgagaaaccatgaatattttgtaaataagttggtaacatcatttcaacaccgcacatggccatagtaaccacaatcaaaccaatcgttgcgatagtgaatgctttagatttgaatacgcgtaaatctaggaaaggatctttggatttgagctgtctgattacgaataatgttaagacaataacactgatgataatcggtaagataacgtagttcacactgtcccaaccttcacttgaaacattggagaatccccataaaaagagaccgaagccaatacatgacagaatcagtgaatatacatctaatttcaatttacggttcggtataacgtctttcataaaaaagaaactcaatacaaatgcgatggctacaataataattggtaatacaaaaatatttctccatgaatcagaaatcgtaatacctaataagacgtggtctttatctaagatccagcctgcaaatgtaggacccatagcaggtgctaaacctacagctaagccacttaagcccatagcagtacctcgtttattgatagggaacatattgataataataatttgcattaatggcatcatcagccctactgcaatggctgtgacaatgcgtcctgataagaaaataatccatgcatcgtgatgtgatggtgcaatagccgttagtgttaagccgattaataataaaccgtatgcacagacatgtaaccacttagtagaaattctggttgctagaaaagcagataaaggcaccataataccgttagccagtaaaaaccaagtcgttgcttgttgcgcagtactaaaatctatatcaaagtcatttattaaaataggtaaagctgtacctaatgacgtttgcatgagtgcaccagcaaatgtggctagaagaataatactcataatgatttttggtttatattgttgtccatgaatgtctaagttcatatttttacttgtttgggtagatataaacaagcctcctaaagttcttgataattaatactttggaaatatagcatcctgtatgaatttgtaaaagaacaaaatatgatacaatgtatgaaatcgaacaacttgtatgattttgtattatatttaaaaaataggagtgatgatgtgggatatcaaaggaagactactttaactcagaagcgtataaaaaacagtttagtaactttgttagaaacacataaatttgatttaattaccgttaatcaaattgttgaagaagcggagatcacaagaagtacattttatagatattatgatgataaatataattttgctatcagagatagaagagattttgacgcatttatacgaagaacgtcaaaagatagatcaacaatttgcgaaagaagatatgttgaatgttgaagtatttcaacaattgtttgaagcattagagccatattcagaaacaatacgacttttattagggcataatggagactcaagttttgaaatgaaaataaagaatgaaataggtaaaaggtttatcaatttaggtgagcttcatcatgtatccaaagtacgtgaagatttagtgaaagaatatttgtatgttattttaattaaaacatttcagtattggtccgctaataaagatagcattgacgtaagagaagtggcatcgacgatgagagatattcaattaaaaggtatcagaaagacaattgggttgtaaattcaaggaaaagcaaatagtagaaaagagggaaataatatgaaaattcaaatcttgttatttgatcatattataaataaaggcgaatcctagtgggttcgcctttttgcatctataagtattttatttgttactggctatgtgttatgacatcgcttcaactacaggttataactgtcgtttttaaattttactgattgatttattttgatagttaggacgtatcattaaatctataataaggaggataaaagtatcatttcttaatataaccgagatttccgttaacagtctcataaaaatcgaattgcatacctgatttaatagcagctccatttaaatctttatcaagtactgtcagtgctaatttaccttttgaaagttcatttgctttgaattgaactgtgtattctccagttttgaaaagatgttttttaatctctagaactgtatagttggttggatcttttctattttttatttcaagatattttaattctgagtttttagagtagagttttaaaaatatgttttcatcttttttgattattttttgcaatatgatatgcattctttttttatatttattttctttatagacgtaatagtatttatcgtttgaaaggtaaagtggcttctcgtctttctttaaataaaagttaacaaagtctataatctcttctttgtcaccatttttaatgagcgttaaggcatgttgattcaatgtgtcatctgcatagtccaaagaattaaaatcattatctatcgtatttaaaatatcttgaaagacaggaagtaatgtatcaatttctttaatgaatccttttttataaaatttaccttctaaaatatctttgtttataattcggtataataagttagcaaaaattttattgtttttgtatttttttgttaagtaacggtaggcttcattttgccattttatacgattaagcacggtagatgcttcagattttactaaagaaatattttcgtcataacgattagcacaataaacaacgtcttgtgtggtactgatatttttagtgttaaaaaacacttcagcgaaaaattgtaaatcttctccaaatatcatttctgggaaacgaatattattttttttgataacactagatttcatcatcctaccagcaggcgctaaatgataaaatgattttctaaaatttttcaaaccaactttattatatgcaattttagataaggcaacaccactacgtgcaatacgatcactatatacatattttgtaagacctgtagcatagtcagttttatttgattttaaaagcgtatataaattttccaaggcatctgaaggtaaccaatcatcgccatctacaaacataatgtatttacctttgcttaaatcgattgatagattacgaggtttggcaggtgttcctgaattttcatctaattgaacaaattgataattagaaaaactttcaatctttttagatataatatcaagcgtattatctgtggaacaatcatctacaatgattaattcaaaatcatttttattcattgtctgtgccaatatactatttaacgtattttcaataaacttctctttattgtatgtacttataagtatacttactttaaatttatttgttactttattactttttataactttcatttcatatccctttctatgttcataagatttataatttgatgaaattttgtaattagcctctagttgtgtaaatataaatagttgctttttgtgttttgtgacaacaattaacttttgttatttattatactattaaaaccagtaattatggaatagtttttaaaagttgtataaattgtgcaattttttttgggggtgattttaaaaagtagcttgtgaatagtagttatttttatagtagtgggggcatagcgcaacttaatgtatttttcagtaaatacgtcttttatgcggttttcgttctcctacaaagtcaaaatatagcttccttgacgtgtggtgtcaaggaagctatattgcttttcgctatattaatagtgaaatgaatttgattagatggaaaacagtaaatttatgatgatggtttacttctgaaatattgagtgggattacttttaagttttggttttctagggacaggtacgatatagtttccatttggaattttaataagtaaatgaataactagtacagataaaccgacgataatgatgtatgaaagaccatataacagtatgctatctctattatcaaaaattgaaatttttaatacaagccattttactaaaggatgtactaaatatatccccatagagtaattaccaattaaagttaatgttttcataagtaatttattttttctaattaaaaaataaaaataaatcaaaaatattaagaaaaacggtgtatataataaaaatgctggatgcgatgaggttacaaaatgatctaaatcaataaacaataaaaaagatataaagacgacaacaatggcaggtaaaaataacttgatatactttttgatcaatgaattgatttcttcataatacttagcaaaaataatacccaatataaaataagaaatccaattgagtatgaatgccctacttgttataaaagtaccgataactggtatatcaattgaaatgtgttcatagtttaattgccataaaatagtgatgaatgtaaataataagtaagttagtaataagggaatcccttttttaattttttgtaagaatggaaataatatgtaaaactgcagcacggttaatataaaatataaatggtaatttccagttccaaataaataatagctaataaagtttttattactatctaaattcacttcaacaacacctaaataatataaataaacggtagtccaaatgatataaggcacaaatattttggtgaatcgtgatttagcgaaatagtttaaatcaaaacctcgttttaatacagaatgggttaataaaaaagcgctaatcactgcaaaaacaggcgtgccaagccgaccaatttgactcaaatatcctgcgagaatggtcatattatggttgttttcgctattcgtatatgaaactgatagatgaacacatacgataaatagtgtagcaatagatctaataataggtatttcttcaaaatacttcaacatgctcccccttaatgaaaataacacacatcagctaattataactgataggcgcagtttaaactagagttgaaattattttggatttaaatcgattttatgtataaattctataacttttaatttttgttgagtgacatagggatagacattgaaaaatgactagttaatgatttagatattcttttttattgtacataaagagactgagacatttatttatgtcccagactcccaatttataacacgatttaatataaactttatgctccaatcaattttagcattataagtgctttgaatggggttccaataaaacggacagctctgttgttaaagtatcaatatcacatggttttgatgcttcaatccaccatacaataacgcctactacagctgatgataaaaattggattgtaatttcattattttcttgattcatgttgtcgcgcattttctttgataatgtttgtttaactatattaagatccgaccttttaaacaaagtctttaaaatagtgtactgatcatcaatgacatataatatttcacgtaacgccttttcattatcctctgattttgccatgtaaagattgcattgatttactgctgcactcaaaataaaatcaatagcatgctcataaaataatgtattaattttacagatgacttgggtggagatgattcgtttatagaggtaagatgcatcatcttatttctacttctaattgctaagcaaagaattaggtaggctaaacagataaaacggtataatgcagtgattattaaataattagtcatgatgcgcatcactacaatcaaaaattttagatgccagttcattggctttatgaatatgtttgaaagtttttgtagtcgataattcaggccagctaaactacacaagtccttcacgactgctccaattttcaggatcggttacattgtctccaatgccctttaataaatttactttttttatttcagaatcattggctatatcaggatagttaatattttgtatcttaccttttttagctttcataaaagcgatagcagacgtacgttttggtgtgaatatatctgctgatttaactttattattaatgtacatagaaatatggagttgataaaggttcatatcataagcattttcaactaagtccattatagcgtcaccaccaggtctagcagcagcttctatgacgtagagttggtcgcctttgatttttatttccacatgagcaacgcctcgcgtaatacctaaagtctgacacgtgcggattgcaaggtttttaatatcttcatttttatatctgtgacttgggactaaatgacccatttcagtaaaccatggtctgggagataaatatttttcggtaactgtaatgacctcataaaaatgatgaccacacaacacttcaactgaaacttcgtcatcactatcaataaatgtttcaatcagaaatttatttttagatacatgaaaggtatcagcataagtctccataatttgtttcgattttctataggcatccatgcattctttttcgttatttgctaagtaaaccccatcactgcctccaaaatccattggttttataattactgggaaagtaaattctttgatacattctttcaattctgtttcatcattaaattgtatcgactttgctgtaggaatgtttgctttttcaaataaggatttcatgatgtgcttgtttctgcaagctttaataacctttggttcaaggtaaggcaaaccgtagtctcgatttaattgattagctacttctaatgtccaatcatttaaggggacgatgctttttggttcgtacccctgaatttgataatatgctatctctttctttatctcttcatagcttaaaggattggcatcaatgcaaaaatcaaaatacgcattgtacttatattttgcattttgaattgctgtccatatttgaaaatcaccgattgctttgccaccagcgtaagcatgttctcttaaaaactgatctgcacctaataacaatagatattctgtcatatgagcttcctaatttttatgaaatgattaatatataaaaataatactatataaaattatatttggaatatagttggaatgaattttgggaaatatgaattttattaatttgagtattttgaattggtttgagagaagtgtaatgaaattcgaagcatgattaagaagattggaaatataaaaaaagactaattcgctcaagcgaattagtctttttacaattaagagtgggggtcgttctaaactctcaattgaagccctacaattgttagttgtttttaatattcgatattcggtgctttattcacgtgtttttgataacgttttaaagcgcaaaaaccgatagcgccgattactgaaactactaatagttttttcatttttttcacaatcctttaaaattattatgcattaaactactatttactataatagtttaggtttaagcttttagaagtttgttgacgtgtacgtctcattaaatcaggatcttcaattaatgattgaccataagatggaatcatttttttgatttttggtgtccattctgatttatattcagggaagtttttctctaatacttctaatgcaactgatactgaagtagaagcccctggagattcacctaataatgcaattacagtatgatcttcagaattaaccacttctgtaccgaattggataaagcctttaccgttttcaggtgtatctttgattacttgaacacgtttaccagcattgtataattgccagtcttcgtcacgtgcttctgggtagaatgtacgaagatggttcatagtaccttctttagtcatcaagatttgatcaattgaatatttaattaatggtaagtttttaactgctgatgctaataaagttgtgatgttatatggtttaacagatttaaataaatctaaattagaaccttgtttaaggaatttaggtccaatactagcgaatggtccaaatagtaatgtacgttcaccatcaatataacgtgtatctaagtgaggtacagtcattggtggtgtaccttgtggttctttaccgtatactttagcatcatgtgcttgtataacatctggatttgtacagattaagaattgaccagtgattgggaatccacctaagtgtttactttcaggaattcctgttttttgtaatagtggaattgcgccaccacctgcaccaataaatacataatcagctagttgtgtttctacactaccactgttacgttgacgtactttaacttcccatttaccgtctttacgttggttaaagtccattacttcgtggttgtattgaacatctacattaggttgtttttctaagtttttggccattttacgagtaagttcaccaaagtttacgtcagaaccttcatcaattttactagctgccataatgtcacctgcactatgaccttgcatcattaatggaatccattttctcatttcttcaatatcttctgtatattcgatattgtcgaacattgggaattctttcatagcttcataacgatcttttaaaaattgaacgttatttttacctcttacaaaactaatgtgtggtaacggacgaataaattcttcagggttactgattgttttgttttgaactaaatgactccaaaattgttttgataattcaaattgttcattgatttctttcgcttgctcaatgttaattgaaccatctggttgtctaactgtataattcaattcacataaagcagcgtgtcctgtaccagcgttatgacgctcgtgagaactttcatcacctggacgatctaaacgctcgtataatttaatatcccattctggtgctaattctttaatcattgtaccgaatgtagtacttaataccccagcgccgattattacaacgctttttgactctttgttagtagccattatctaatcacctttccttatctcaacttgcaactatagtataatactaaatcacctatcattaaaatacatattttttataggtgccattctaatatggaatcttttttatttctactattaaaacatagagagaaataaattttttaaatatcttttttgttattctattgatgtataacttcatttaaacagaaaatttacaaacattccataatatagcattgctaattaaatatagaaaaattatagttctatgtaattttaccccgatcaatcttcaacaaacacaactattaaaatatatgtacatttatttatgcacgcacgcgtgtaagtactaaataggagagtttaatttttcaagtatcaatatatgagcaactggaaagataatagctattttaaaaacttcctatataatagttatccatatacacgcaaattatccaactttcacatgttctaaccattacttttttctatgggttagatagataatatgtattttatatatatgttgcagcgttttataataagtatgtaatcaatttacagcgcaaatcattcgttatgacatgccatggtataggactaaatgtgaacggcgctaatttagagtattaaatatgattttttcataataatgtaatgagattaaatttttaatacattgttaagtgaataatttaaattgcttgcaatgattaatgattttttgcattaaatgttgaaagggaatgaatgtaaaatggctgacaaaaattatacagcagcaaatatggtaataaatactttgaaaaataatggtgtggaatatgtattcggtatcccaggtgctaaaatcgattatttattcaatgcacttgaagatgatggcccagaacttattgtaacgcgtcatgagcaaaacgcggcaatgatggcacaaggtattggacgcttaacaggtaaaccaggtgttgccttagtaacaagtggcccaggggtaagtaatttaacgactggacttttaacagcgacatcagaaggagaccctgtattagcattaggtggccaagttaaacgtaacgatttattacgtctaacacaccaaagtattgataatgcagcattattaaaatcttcaacaaaatatagtgaagaagttcaagatccagagtcattatcagaagttatgacaaatgcgatgagaactgcaacttcaggtaaaaatggcgcaagtttcataagcataccgcaagatgttatttctgcaccggttgaatcacaagcgattgcactttgccaaaaacctagcttaggtgtgccaagtgaacaaaatgttaatgaagtaattgaagcgattaaaaacgcgaaattccctgtattattagcaggtatgagaagttcaagttcagacgaaacgaatgcaatccgtaaattagttgaaaaaacaaatttaccagttgtagaaacattccaaggtgcgggtgtgattagtcgtgaactagaatcccatttctttggtcgtgttggtttattccgtaaccaagtcggtgacgaattattaagaaaaagtgacctcgttgttacgattggttatgatccaattgaatatgaagcgagcaattggaataaagaattagatactaaaattattaatatagatgaaattcaagcggaaattacaaatcatatgcaaccagcaaaagaattggttggtaatattgctggcacaatcgaacttatttctgacaaagtcgatgaaccttttatcagtcaaaaacatttagacgaattagaaactttaagagcgcatatacttgaatcaactggtatcaaaccaacacacgaagatggcgtgttacacccagttgaagtcattaagtcaatgcaaaaagtattatcagatgatacaacagtaactgtagacgtaggtagtcactatatttggatggcacgtaaatttagaagttacaatccaagacacttgctattcagtaatggtatgcaaacgttaggtgttgcgttaccatgggctatttcagctgctttagtacgtcctaatacacaagttgtatccgttgctggtgatggtggtttcttattctcagcacaagacttagaaactgctgtacgtaaaaatcttaatatcattcaattaatttggaatgacggtaaatataacatggttgaattccaagaagaaatgaaatatgaacgtagttcaggtgtagactttggttcagtagacttcgttaaatatgctgaatcatttggtgctaaaggcttacgtgtaacaaatcaagaagaattagaagcggcaattaaagagggatacgaaactgaaggaccagtattaattgatatcccagtgaattacaaagataatgtcaaactttcaacaaatatgttacctgacgcttttaactgatatcgaatcaaacggcgaaaatgattaattatttatcaaaataggagtgaataaagttatgactaacgtactatatcaacacggcacactaggtacattgatggcaggccttttacaaggtactgcttcaatcaataatttattagaacatggagacattggcattgcgactttaacaggttcagatggtgaagtgattatcgttgatggtaaagcttatcatgccaatgaacataaagaatttgtagaattgaaaggtgatgaattatcaccatatgcaaccgtatcaagatttacacctgataaaacgtatagcacaagcaataaatctttagcagaagtttatgatgaagttaaagaaaaaatgttaagtgaaaatttattttctgctgttaaaatttcaggaacatttaaaaaaatgcatgtacgtatgatgccaggacaagagccaccatatacaagattgattaactcagcgaatagacaacctgaacaaattgaagaaaatatcaaaggttctattgtaggcttctttacaccagaattattccatggtattggttcagcaggtttccatgttcatttcgctaatgatgaccgtaattttggcggacacgtattggattttgaagtttcagatgttacggtagaaattcaaaactttgaaacatttgaacaaaattttgcagtcgatgatgaagcatttacaaatacggatattgactacaaagatattgcaaaagaaataagacaagcagaataaaggagtagcgagcaaatatgttagttgaaagttttaacccttttaataatctgctactttcaagtattgtagccgcaataccaattatattatttttattatgtttgactgtatttaaaatgaaaggtgtttatgcagcaattacaacgttaatcgttacaattattgttgctatggctttctttaaattaccaggaagtattgcaggcggcgctactttagagggcttttatcaagggattatcccaataggctttattgtaatcatggcagtttggttatataaaattgctacaaaaagcggccaatttgctattgttcaagatagtatcgcgagtgtctcacgagaccaacgtgttcaattattattgattggctttgtatttaatggatttttagaaggtgctgcaggctttggcgtacctattgccatttgtgcggtactattaacacaattaggttttaaacctttgcaagctgcgatgtattgtttagtaagtaatgcagcagcaggtgcttatggtgcggtaggtataccgattgctatcgtggatactttgaatttgccaggtggtgtaacaacatctcaagtagcgttaattggtaatttaacgttaggttttattagtttcgttgtgccatttttattaatgtatattatggatggctttaaaggtgtgaaagaaactttcccagccactttagttgtggcagttactttcacagttttacaagtgcttattgcagcttttgctggaccagagttggctgatattatccctggccttgtagcaatgattgcattagcattgttctcaaaaaaatggcaacctaaaaatattttcagaattaataaagatgaaaaagcagatgccgtgcctaaacattctattggacacatcacttatgcatggagcccgtttatcattttaacgattgttgtgatgatctggagcttaccagcatttaaaggtttatttgaaaaaggtggtgccctaagtgcacttgttgtgaactttaatgtgccgggtacgatgaatgctgtgactaataaaccgaatgaactgacattcaatttctttgctcaaacaggtacagcgattttaattacagcgatcattacaattattattgcgaaaaatatgagctttaaaacggctggtcatttactgggtctcacagttaaagaattatggatttcagtgttaaccatttgtttcattttagcagtatctaaaattacaacatatggtggattaagtaatgctatgggacaaggcatatctaaaacaggcgctgccttcccattattgtcaccactacttggttggattggtgtatttatgacgggatccgtcgtaaacaataattcattgtttgcgccaattcaagcctctgttgctgaacaaattggtacaaaaggttcattacttgttgcagctaatgtcgctggtggtgtaactgctaagattgtatcaccacaatctatagctatcgctacagcagcagttaataaagtaggtaaagaatcagaactgatgaaaatggcaatgcgtttcagtatcggattgttaattctcgtttgtatttggacatttatttgtagtttatttatttcataaaatgaatttgaaaagaccgaaattaaagcatatcatgctcgctacttagctatatgagcatgtatgataagttaaaaagttagtggaaataccgcatagattatttcctggaaaatatttattataaaaccaattaaaaaacactaaagtcgatggcgttttgtcatacgactttagtgttttttgtgttcctcaaagctttgctgtatataaagtattatttatgctaaagattccccaatcaattctatacacattttcaattttatttggacaaaaatgctaactgcgatacaccaactctaactataaaaattgtgttagttatcgctttttaaaattaaatataggtgtggctagcagtggtttagttaaattgtttaagtgttaagtcaatgaattgatcacttgcttttgttaaattttctaatttgttataaccaatcactactgtgtttgtaaatgattgatttaattcaacgtaaatggcgtcactattatgttcagtagaactacttggtataaatgtgaggacgcctgtagaaattgcaaggcgatcggcattgtctacgtttgaagtttctaaaataatattagggtaaatgttgtatgtttctagaactttattgatgatctgtttaagtccgtatctatcttttagaatgataaagtgatcgtgagatatgagtgacatgatttcattggaatttaattcattttgttggattcttttatataaatggtgctgaggtggcacaactaaatatatcggttccgtatagatttgagtgtattgaatatttttattccataatggtagtgtatttagacataaatcgactttaccctctagtacttgtttttcaatgtcttgggaattaccttcgattaagttaattttaatattaggaaaaagattcataaatttaggcagaattttatgtagtatatggaacgctaatgtaggtgtaacacctatgtttaaaaaaccggaattcaagtttgaaatattagtgatttttcgcattacatcatgataaagtcgctcttgttcttgtagatatttataataaagttgaccttcgggcgtaaaggtaatggaatgttttttacgattaaaaataatgatgttccactcagtttcaatatttttgataaaactactgagatagggctgggaaacatagagtttattggctgccttggttattgttccttcattgatgatcgtttcaatatatttatagttacggttaataaggctccctccttaatgacataagtaattacttataagttatatatactaaaaactattttacatttagtcaatatgagcagacaatatatatgttgcgtttaattcttaaggggaaggcactgtaactagaaaggaagtcaattttttatggaaaataatacaatggatatggaatgaatttggacaaaaaatttcacgatgaattttgtagttaactttttggttaatttgaatatgtatttactgattgttttaattgcaggctatgcgcagtctcaatttaatgcctcagatagttcggctgggctggtagcaggtttatttatagtcggatcactgatgggtagatttgttatggggaaatatatcaatagtttaggacctagaaaggtactcttaattggaactgtattatttacaattacgagtgttttttattttgtagaatcttcattattatttttaattattgttagaatcattaatggattttcatttgggatttgtacaacttcaactggatcaatagcagggtatataacaccggaaactaaaaaaggtgaaggtatcagctttttagtttgagtatggtgcttggtgtagccattggcccatttttaggtttattgttaatgcaacaatattcaatagaagtcatctttggacttaatcttgtattgagttttatttcattgattttggcaatatttatgaaagtaccttttgaaacaattgctagaacagcagaggataaagggtttaaggtttcagattttatcgcgaaagaagccattccaattgccattatcgtgtttatagctggtctttcttattcttctattcttaattatattaaagtttttgcgcaagagagagacttaattacagcttcaagttattttttcgttatctatgcaatcgtctcgattttttcaagaccagtttgtggtagattaatggatgcaaaaaatgaaaatatagttatatacactagtattatatttcaggctatctgtttcttagttattgcattttcacattcagcatggatgttattaattggtggtgctttattaggattaggttatggtaatatcacgtctacgtctcaatcggtatctgtcaaagtcgtaccaaaagaaaaaattgcgcgagcaacctcaacattctttatcggtttagatttaggcttaggatttgggccctatatactaggtttgtttactaatcagatcgggttaggcaatatgtatatagtaatagctgtattattaattgtcactttctttatctatcacttcatacatggtagaaaagtgagtgtgtcaaaagcataatcatgcccctcgtgaaatattgaatccattttcaagaatttgaattatttaattaacatatgcccctttcaatgatggcacatataagtgcaaacttgagaggggatttttatatattttaaatggttacacataatacagctgctaacaaattgattaaagcctgagcatctatttatgttatacaagcgcaatcagtttacgatatgtacaaagctgtaattttagttgtttagttggtacactgaatatacagtagttgttaatacaaatacataaaaattataagataaatgaaaggaggttgtttatgtttttagcatggaatgaaataaagcgtaacaaattgaaatttagtctgattatcggtgtcttaattatgattagttatttgctgttcctattatcaggtttggcaagtggtttaatgaatatgaatagagaaggtattgataaatggcaagcagacgctatcattttaaacaaagatgcgaatcaaacggttgaacaatcaatgtttgataaaaaggatgttgcagatacatataaaaaacaaacaacgctaaagcaatccggtgtcattgtatctaatggagataatgaagaaaatgcattgctatttggcgtaacagatgattcttttctcgtgccgaatatgattgatggaaagaaatttaatgctgataatgaagtcgttgttgatgaaacgttaaaagaaaagggattcaaactaggtgatacattatcgctatcacaatccgacgaaaagttaaaaatagttgggtttagtgaaagtgctaaatataatgcttctccggtacttttttcaaataacaaaaccattgaaaatattaatccgtcattaactgaagataagacgaatgcagttgttgtaaaagataaagattggcagtctaaagatttgaatcataatttagaagcgattggtattgaaagtttcgttaaaaacttaccaggttatacagcgcaaaacttaacgttaaactttatgatttcatttttatttatcatctctgctacagttattggcatctttttatatgtcattacattacaaaaaacgaatttatttggtgtattaaaagcacaaggcttttcaaatggttatttagccaaagtagtgttgtcgcaaacgtttatcattgccttgattggtacggtcattggactggtattgaccataattacaggagcgttcttgccgagtgcggtaccgattaaatttagcgccacaacattattaatttatggggttgtccttatcgctgtttcattaataggtagtctattctccatattaacgataagaaaagttgatccactgaaagcgatagggtaaatgaggagtgtataataaatgctagaatttaaaaatgtcacgaaatatttccaagatggaaaccaaaaaatagaagctgtgaaacctacctcactaaaatttaatcaaactgaactcattgcaattataggaccttcaggatctgggaaaagtactttcctaactatggcgggcgcacttcaaacaccgacgtctggagagattctcattaatggtaaggaagtctcccagatgtctcagaaagcattagcaaacacgcggatgcaggagattggctttatacttcaagcaactaacttggtgccttttttaacggtgaaacagcagtttaaattattggctaaacaaaagaaagatgtattaagtcaaactgaatataagcagttgatgtcacaactcaatctcgaagcaattgaaaataaactgccgagtgaaatttctggtgggcaaaagcagcgtgtagccattgctaaagcgctatatacacaaccttcgattattttagcggatgaaccaacggcttcgcttgatacacaaaatgcgatggaagtcatgggaattttaaaagcacaaacatcagaaaaaaataaaacgtgtattgtggttacacatgatgaacgacttacatcctattgtgacaaggtttatcatatggaagatggcgtgttaacacatacttaaataacggtttaatatgggtacggtgatattaaattattgtgaaagttaaagttataatctctaaataaggggatgagcataatcaaacataggcatgaaatggaattgttatggaaagcatataaatatgaggtcatgtggcatagtcaacaaagctataatgagattagagaaatgcttaaagggcaatgtgaatatagagatgttgaagaagcaattgatcatgcactgtccatacagcctagcaaaggttcggtaatcaatacatttagccatatatggggttattttaaaaagttttgtagcgcctcagagaaagcattatttaaaaagctgaaggcacaatacttactagatcgaatcgatacacatacgctcattttctttatctattgtatgacaagatattatgatgttacgtatctcaaggaatccacattaatcaaaaatttttcaatcgcaaatagatcatttaaataggatgatttgctaacgtgatggttgattcaagtttatgatatacgctgtgtgatttagtcgatggtatgggcgataattttaatgtcattacaatataaagtttcttaatcataacggttggtgcatatgaagcatcaatcattatttttgttttaaatttaaaaaaagttgtttcatatgctgtttatataactaattgactctataataatggaatggtaatattatccctattaatccaatcggaataataagtgtgtggagggataaagatgaaaagaatgaaattaggatattttttaactggttttggtcaccatgttgcgagtagtagacacccagatgcattagaacgtgggggtataaatttaacgaaaaccattgaacaagcaaaaacgttagagcaagctaaatttgattttctatttgtgtctgatagtttatatcttgataacaagacgcatccagatatgtttacgatgtttgagccaatttctttaatgtctattgtagctagagaaactcaaaatcttggattgattgtgacaggatctacttcattttcagaaccatttagccttgcgagaatcttttcgtctttagatcattacagcaatggcagagcgggttggaatattgttacataaggtattaattatacagcgaagaattttaatggcactacgaatgcaaatcatgatttacgctatgatcaagccgaagaatttgtgaatatttctaagcaattatggagttcttggcgtggcgttaatacggaacatcttcatgctgcaggaggcttttttggtgaaaaagagccagaaccaattaattatcagggggaattttacagtgtaaaaggcccattaaatattgaagcatcacctcaaggttatccattacttgtacaagcaggttcttcagaaaagggtacagaatttgcgtcgaaacatgcagaagttgtatttacagcgcaaaatgatatcaacgatgcaatcacgtttgcacataatttgaaaaataaagttgaacaaaagcacgtaaatgcacatgaaattgttattatgccaggtatttttccatttattggagaaacacgcgaggcagcggaagcgcaattccaagaattacaaaatcttattgtgccagagatgggaatagagttattatcttcttatttaggtgatacagatttaagtcattacgatttaaatacaccgtttgaaaatattgaagtagaaaaaggaaacaatatacaaagtcgtgtagacttaatcaaagatacagcgaagaagaatgaatatactttagaagatgtaatgaagcacgttgctggtgcaagagggcatcatatcgtcgttggtactgctgaagatgtagcggatagaatggaagaatggtttacaagtggtgcagcagatggattcaatattatgccaccgctcaatccgacgcagtttgatttatttgtcgataaagtgattccgattttaaaagaaagaggtttgattcaagcggcttatagtgaagggactttacgtgaaaagttgggattaaatcaaaaaatacatagttaatatggatagataaaaagctagaaaaagtgacgacatcgcatccatttcgatattaattagaaggtatttgcatataaaaaataaacaaaaagagaacgtaccgtttaaaagcgcgttctcttttttatatgttcaaacgcaacatatagcctttagtcaacttcattaatcacgaatcgcgttaactacatcaaccatgtcatcgtgaataacaacatctgcatctcgatcatagggcgttgcatccttattaatgataataaggtgttgaccttcaaaataagaaatgagacctgctgcaggttgaactacaagagaggaacctaagacgactaaggtgtcagctgcttgaattttttgaatcgcattagaaatagtctgttgatctaacatttcaccgtaaagtacaatatcgggtctgattggactaccacatgttttgcaatggcgtagatgctttgccatcactgtggctttatcatatttatgttcgcattggatacaatagaagcggtttaaggttccatgaagttcgtcaacattcgcgcttccagcatctgtatgcagtccatcgatattttgagtaataacacctaatgaacgttgatggtgttcaagttgagcaatccattcgtgtgcgacattaggttgcttgtctgccaatagtaggcgcttatgataaaaatcaacaaatccttctggatcattttgtaagtattcagcgcttagtaaatattctggagcgtagccttcctttgaaatctcatcaaacaagccgcccatagatcgaaaatcaggcacgccacttgcgacagagacgccagcacctgtgaaaaatgtaatctgattcgcatctttaataatcttttttaagtgttcaatattttgattcatttatctcactccattggaaattttaaataatatgatgcaaatacgagtaatatgcgttgcgcttttaatataattttaaattttagaaagtattttagcaaatataagagaatttaaatgatgttcaaaagaggttcgtcagatacaagacaattttatgaagcatgctttataatgggtttaaaatgagaaccgaggttattttagtgaagaaattgtggatttggggagcaagtatcatagcgatagttattgtagtagggattgtgatggcagtctttgtaagtcaaaagccatcaaaacaggtaacacactcaaaattcgtgaatcatccgatacctacattatttttacatgggtatggtggcagtgccaattcagagaagttcctggtacaacaagctgaaaacaaaggcgtcactcacgatgtcatcaccgcagtggtatctgaaaatggtaacgtcacctttaaaggtcagttaaacaaaaatgccatcaaccctatagtgaaagttgagttggaaaataataaagacggtgactacgataaaaatgcaaaatggtttaaaaatgttctggtagccctacaaaaggaatatcaattcaagcaattcaattttgtaggtcactctatgggaaatttatcatttgcgacgtatatgctgaattatggtaacaatgcctccctaccacgtttgaataaacaagtaaatattgcgggaacatttaatggtgtcttaaatatgaatgaagaagttaatgaaattagtgtggataaagaagggaaaccaagtcgtatgaatccaccgtatcagcaattgcgtgaattgaaagcaatttatcaaggcaaacagattaaagtgttgaatatttatggtgaccttgaagacggcacgcactctgacggtcgtgtatcgaacagttcttcaaagtcattgaaatatttattgggcagtagtccggaaagttatcaagaatcaaaatatcatggtaagcaggcacaacatagccaattacacgagaatagagatgtcgctaatgaaattattaaggatttatggggcacatcataaaattaaacatttaagggttagaattgaaaatttataaagtgtgaattgggtttattgttatggataaattatacagtataaaagacctggaaatgcatggaaagtgcgttttctaggtcttttatattttgtcgtattatcattgttaagcttcaaagtagagatagcgaggtctaagtgtttaacttttcattatgtcgtgaaaggtgttcacgtaatgtatttttatgtttaggctgtgtaatgagttggttgctattagtttagcaacatatttattataagttgttaaggatcagacaatcttcttgttctgagcctatgttcgggtcagtaatgatttgcattaacttagaaacttcggaaattaatgtttcttggtatggtgagtctgcactgaggtataaatcgataaggcgcaccatgccgttactaataaatgtaaggtatacatagtcatctaatttttgatttaagccttcttcataaggaatttttttctcgaattctttttccataaaagtacgcaaatttttcttatatttatcagaatattggatactgaaaagttttgtgaaaaacgctttgttttcttcaaaaaacgcaaaccaaattttaactccctgttgcataccgagttcttttttggcttcacaaatttcttcgagcgcttcgaattttttatcgacaatacggcctaataagtcatatttatcaatataatgtagataaaatgtttttctcccgatttgcgcgtgttctgtaatatcttttactgtaattttatcaaaatctttctgttcaaaaagctcataaaaactatcattaatggtctttcttgtttttacaatacgtaaatccatcgtgattacacctttcttataacccactttcaataaaatgagtattatttctcatattgtactacttatgaattgtataattgattctatttgttatgattcaattatacacacatgatacataattagttgtcaaaaatctttttatcgggaaatattattgtgataatttatgcataatacatttattattaaacaaatttcttgaacaataattactctagctaataaattaaatattagtaaagaataatttgatttaaaaaggcgtcatagggatgtctgatcacaaggagaagaaagtgcttcaagaattaaacgattttataaaacattatatcagtcgctaggagatgctcacttcaatgttatcattatagtgttttacacaaaatcatattttaaataattgcttttaatatataaagggcaaacaagcttatatacaaatgacgcacctcaatttaaaagcggttagtcttttttattggatatatctttcgtaaaacaccagtttaaggtagaaaacaactaaaaaataatttaatattaatctaaggaataatatgacctggcttatatattatagagatgcatacggacacatataccttaagtaatgaatcattgtggaggtttgtaatgtcaacagagattaagggaattacattttttacagataatttagtggatacatcatcgcatgcttgtaatacattcaacgtcaatccaacatacaaggaactcttttttgataataatgtttataccatgtcgagtgcgcaaggaaaattcaggttgtcaaataaccacccattaaaagtagcaaattatgcacaaattgaacaatatgcaatattttttgtaggaaatgtgtttcatactatgggtgcttttagttcaacgaatagtcaattaccagctaatacaatcgttggtcgctatagctcaatcgctgctcaagttagaagaatggctggcaatcacccgatggaacgttttacaacgtcaatgttaacttacagtaaaaatacttgtgcatttaatgactatcttgatgcggcaggcgttgaattcgatcatcgcccctcaacagtcggtggcatggaaccgatagttattgggaatgatgtatggattggacaagatgtattgttttcttcaaaaggtatcgctgtcggtgatggtgcgatagtagcagctggttcagtggttaccaaaaatgtgccaccttatgcaattgtgggtggtaatcccgctaaagtaataagatatcgatttgaagcacatattattgaaagattacttaaattaaaatggtggcaatatggatttgcagatttcaaaggcgtgactgcagacgattcgattgaggtatttttagaaaaagtagaaaaacttgtgtctacaaatcaaattcagccatttcgtcctacaaccatatcagtaaaagactttttagatattgaaaaaagttcagaggaataatttcaaatatggatgtatgaattgtataaaagtgaagatggtacacggagtcctattaattggtttcgtgtaccatttttatttgttaatatgcgagttaacaaaggggaatcaaggtcaattatgaatgttataattagttgctaattttatacatataatactttacttaataacaaacgggacagcagctgaattaaatcaggtttgctgtcccgtttcgggctggaaaggattaagtttagaatgtattggttatagtgtgtgtattgaagttttagctaaattttaattataattctattagttttgttcgttactaccttcaaacaatgcaatcagtccatagggtgcatcttgacctaagcacaagtctaataattcatgagattcttcggcctctgcggcactacgtttaaatagggcatgttcatagttttcaagtgcaagttcaatatcatttggatattcaacaattaacttgccaagctctgctgcatcatacattgctaggtttgcgccttctccagatggtgccattaaatgcgcagcatcaccgagtagcgtaacaccaggtgtacgttgccaactaggttttacaaataattcaataccatttgcaattatattatcataaagctgatattcaaaataaagttcgttcaagggtatatttgctaaatcatttaaatgaagtccagataattggaaatggtgattagcagtgactgttacaggcacttctccagagtttaaaaggttattataatgtttaagttgccatgtaaaaagtccttcaaatgaatgcgttaaatcgttaacaactgtcatgtttacacttttatggcttatgtgaatgactggaaggacagatgcatagaaacgtttagtgaaatattgttgcgctttccatcgaccataataatctaccccagaccatgaaatggttggccaacaatcattcatttgccatagtagcacaccacgacaataatcattttctgaacggaaatgttcaactgaatagcgcatcacgataccggcaagtatttgtgataaatatacataatctgtaaaatcttcagttaatttaaactcggcttgcatataattatcaataatttgattgccatctttacatttttgatgggtcaacatcactgacgaattgggagattgatcacttgttttggaaaatgagtcaatcgtcttcataccaggataactttgaaagcccatttctgaaatgaaacgtgcatgaagttgtttgatagattcgtaaggtgcttggccatcataagctaaatagtaatgaaaatcgccatccttagcgtaatcaaaaatggacttagacgtatggtttgatttcctgtttggagatgaatgagcgtaaggtacttgtggtgcactccgtttcgtaatatcaggtattgtttcaagaaatagcgtcttatagcgtgtttgcattatatgtttcatattttcatctgtgattttcgatacctcgaagaaatctcgtgtctgtgcggtacgaggtccatcacttgttaacattgtataggtcatatcgatttcattgtttcgaaatagcaatattaaacttgggtgatgtgccatgcgttcaatattttgaatcagttccatagtcacattgaccatgaaatccatatctgttgggtaagacatactcgtaaacatacaatcttggataactaaaataccgtattgatcgcacaaatcaaagaaaaggtctgacgggtagtaggctcctcccacacacgaatacaattgatatttgcacgcacacaatctttaatttgggctgttaaactatagcgacgtgattgcgttaaaatggcatcttcaataatcatgttcgtacctttaataaacacaggcgtgtcgttaattataaattcgaatttagagccgtctccatcattgtctcgatttaatttgaccgttcttaggccaatcgaatagcttgtgtgatctatggattggttacctgtatatagttcaacgtccacagtatataacggttgctcaccgtaacctattggccaccataactgtggattttcaattatgaaagtgtgcttgaatgtatgactattgttaattgtaatagattcgatagcctgattgttgggatcgtacaatgtgcatgttaaagatgtggcttcgtcaatagctttttttgaacgtacatttaattcaactgtttgtgtatggtgtgtctgagtaaatagaaaaggtggtatgttcatgtaatcgccgtattcaatcgcaatcgatttccatataccgaaatcaggcaatttaatgccccagtcccagccaaacatgcattgagcttttcttaagtaagctaagccattttcaccttgcagttttatttcttttaaatactgtactggagagtaaaattggatttctataatgttttcaccaagttcgacataaggcttaatatcaaatttataacgacgaaacatattatccgtttctaatacgttggtatggttgatgaaaatcgttgctaacgtatcgagaccttcacaatttaatagaatttgctcactcattaatacctcggtttctaaagtaaacgtcctagaaaaactgtaatgatcattaaataaatattgaattgcgtcttcgttatttccataataggggtgattgattaaattattttcaagtgctccggttacgatactaccaggtattgtgacaggcatatcgtggaaacgtgttgtgtttgtgagaatatttaatgtccaagtaccatttaagtcaattacattcactgtgtccatctccttaaatatcttgatatataaaagtttagcacttttataattcataataaaaaataaagtggcgtaaaatctaaaaatgtattggtattaaatatcttccaagacaggtattgcttttctttgtttagtaacggcgttcgtttgaatgtctatttcaaaaaccatttctgaatgaccagcttcaacaagaatttctccgttagggttaacaaccatagaatggccagcataactattccccttgtgatgttgatgatttacattacccacgctattgcatgcaatgacaaaacaattattttcaatggcacgtgcttgtaataaaatttgcatcattcttaatagaagctcttgctacttcaggatatctcaggtcgtagcatattatttgtgatgcttgaatgccattaatagaaaaattgttaggttggtttaatcctggcgataagtaaaaaggttcatctagcataggtaccaagtgaattttatccgtaacatttaataatgttttatcttttgaaactgcaaaagcagtattatagatggcgttagttctcatattagctacagatcctgctactatatgtgttgtatactgttgtgcaagttgttgtataaatggtagagattgttgtaaatctatgtccgctttatcttttaactgatttaaggcataaccattattccacatttcaggtagcacaatgatatcagcatttgtgtaatgcgtttctattaatgaagagatctttgctttgttttgtttgaaattcgcttctgcaacttcaaattgataaatttgtaatttcatattgcttactcctcgtacttaaatttataaattgaataaatgtcatctgaataatatagatcatcgccatgtgaagttgtaattaatttgggacaaagattatctatgatttgaccgcttttgatattttcagtcatgttataagtgaattttttgataggaatatgcagatgttgcgcatctgaaataaataaatctccgcatattaaaattttatcttgattatgaaaatagatgacatgacctggtgcatgaccaggagttaagtaataattgaagggcagatttgtattagtttctagaggtttaacaatgtattgaacacctgtattttcggtatgcgttttatttggataaggcagctcaccattgatataagggagttcatttttatatgtaaagataggtattttcaaagcttcagaaatacgttttgcgccattgatatgatctagatgtccatgcgttaaaaaaatgcctttaggattaccgagcgatttagcaatcgtgatttgtagctcagcataatcatccatacctgtgtctatgatataaacgtcgttatcattcacaataaaccaagtgtttatttgtatcgggataccaactgttgtctgtatatttaatttataaatatggtctgacatttgaatgagtttcattattatcgcttctttctattatttgttataactaaagggtagaggataagcgacaatgtcacaagaaggcacaaataagtaactcacgttaatgaggaggttcatatgttaaaaaatagcatggactatggtagctgtaatcttgtaattcaacgaggatgtccgatagaagaaacattgatgtcattaggtggaaaatggaaaggtattattatcaatacgctttatgatgaagcttacttttataatgcattacatcgtgaagttttaggtataagtagaaagattttgacagaacaattaaatgatttgattgctttgcaaattgtaaaaagagaagaaacgaatgattatcctaaaaaagttcgctattccttaactcaacgaggaaaatccgtctacccattgataaatgaattggcgcaagtgcttaaaatgaattaactatgtcgtgttattgtggaagtttaataaaaaggcaagctatctgaattaaaaatgctcctctcaaagttttcattttttaatgtctattttgagaggagtattttttatgtgttagtctgtatttgtttggtgtactgaaaaacatgtacgatattcagaagcacttatttcaaaatgttttgtgaaatttttagagaatagcagtgggtctttataacctattttgctagatatttcatttatcaataaattggtattaattaaaagttgagaagcatgatacatcctaatataagttaagtattccttaggcgaacagtttaaatttcttttaaataatttgaataaatgacttcttgagatattgactgattttgcaacatcaacaattgtaatatctttttggtaattagaatttatatattcgacagcatattgaatgtcttcatttacaatatcaacttgaacagaaaagtgttttggaaacttgtcttgcaaggcataaaccagttgatatatatgttgcataatcagtatgtcatgagaattattagattgaatcgtttgagataggttacaaatttttttaataatagattgaatatctttagtgtttttattaataagaacgtgcgtatcgacgatactagagcgagataaatatgtaagaatttgtttgccattaattcccacccaataataagtccaagggtttgagaaagaaggtttatattcaacttccatacctcgttctagtaaaaacatatctcccgctttcagatgatgagtttcattattatatgtaaaaataccttcaccttgtgtgacgatatgtaatacggcttgttgaaaaacgttatagctatagccaacattcggcacaccaacttcaataccgcattctgccaagttggcatctatcaatttcttttgaaactttttccatagtacttgcataatatccctcttaattaaaaaatgattttaatttgtatttatataaatacatagtaatatgaaatgaaacattttgccatatatcatcaccattatgctatttatccctctatatctgtattgataaaataaaaacaacaaacatgaaagcgctttacttaaaaaggatttagaggtggaaaaatggacagacatttaacaggaaagcagaagtttgcatttggatttggagcaattggtaaagatgccatatttaatatcgtcggtgtctttttaatgttttatatcacagatattgtaggtttatcacccgcatttgttggtgttatgctatttgttgctcgtatatgggatgccataaatgatccaattatggggatgatagttgataacactagaaataatttcgggaaattcaaaacctggttgtctataggaacgttagcgaatgcaattgtcaccatattactatttactaactttgatttaccacagacagcaatgtatgtttacatatcaattttatatatttcctggggaatgacttacacaatgatggatattccttattggtcttggttgccgaatttaacacataatcctagagaacgtgaagaagtgtcagtaattccaagattttttgcgagtttagcagcattcacagtaggtacatttggactgtattttattcatcaattaggagacgtttttggtaatggcagtgattcagtagggatattcatatttgcaatcatttgtagtgcagtatttataattacaattggtgttactgtttttaaagtgcctgaagataaggaattagaacaacaaattggtattaaagttaattttaaagatattggacgtattttatttaaaaataaagagttattggcaattatgggggtattactaacttttaatttatgtttacaaactttaaatggttctattatttactattttaaatatgtggtaaatgcagaacatttattttcaatttttaattcgatgattttatgtgaaatggttggtttattattacttcctagatttatcaaatgggtaggtagaacaaaagcgtttaatacggctgtttcatttattattttaggattattgattattttaatagctggatttatcgctccgaaaagtacacttttaattattttaggtgcgggcattttgagaattggttctggcttcatgataggtattacaacagtttcattagctgatgttattgattatggtgaagttaaatttggacaacgcaacgagagtatcatcacgtcaacgaacactttcttaactaaggcttcacaagctgttgcagcattaatagttggtgtcggattatcaattctgggatacacgccaaatgagtcacaatcactcgttacaattaatggcttaagaatcatgattatcatagcaccactgttattcgtttgtttaactgcatttttatatcacaaagcctttaatttgaaaggagattttttaacggatattgaaaagactttgcaatttaaacgtcaacgagaacatagagaaagaattaaatagggggatgtcatatgtttaaagaaaaatttcatgaagatttagaaaaacaaaatgtgaatttgttgcctagaagagctttttatataccatatcagcttggagaaaaagattatgatttcaaaacgagatatgaaactcaaaatatcacattacttaatggtaaatggcaatttgaattttttaattcattggaagactatacaaatgaagatattaatagcaaagagcaatatttaacagtaccatctgtatggaatttgtatgggtttgatcagattcagtatttaaatacacaataccctataccgtttaatccaccatacgtgcctagagaaaatccatgtggtcgatataaacgttcatttgaaataaatgactataatgaacaaagcgattatcatttgaactttgaaggtgtcgatagtgcattctatatctggatcaatgaacagtttgtaggatatagtcaaattgcacattcaatttcagagtttgatattacaccatatgttcaaaaaggaataaattcaattgaagtcattgtacttaagtactctgatggaacatattttgaaaatcaagacatgtttcgtcattcaggtatttttagagatgtatatatattaaaaagatctaaatcgcgcgtggacgactttaaaattgagacaacaataaaccatgaatctaataatggaaaaataaatttcactttacaaggaaagcatcatttagggaatattaacttggttttatataatcctaaagggctagaaatagatcgcgcaattgtttcaaagcatcatcaatttgtaatagataatccacaattatggtcatctgagaatccagtactttataagataattattgaaacagaaaacgaagtaatcactcagaaaattggaataagagaagttaaaatacaagataatcaattctatattaatggaaaatcaattaaaatacggggagtaaattaccatgatagccatcctcaaaatggttttgtcatgtatgaaaaagattttgaaaaagatttaaaattaatgaaacaaggcaattttaatgcgattcgtactgcgcattatccgaaggcaccattattttatgaaatgactgaccaatatggtttctatgtaatgagtgaggcagatttagaaactcatggtgtagtaaggttatatggagaagaaaatacagaacactttaatattattgctgataatccaaaatttgaaacatctattattgaaagaatagaagcctctatcaagccattaaaaaactataattctattgtttcttggtcaataggtaatgaatctggatttggcatcaatatggttaaaggattggaacgggcaaagcaattagacacgacaagaccattacattatgaaggtgcattgtatcgagataaagaaaaaaattatgatatgtccaatgttgatatgataagtagaatgtatgcttctccagaagaaattttagaaacatatctagaaaatcccaaattagataaaccgtttatattatgtgaatacgcacatgcaatgggaaattcaccaggagatcttaatgcatatcaaacattaattgaaaaatatgatagttttattggcggttttgtttgggaatggtgtgatcatagcattcaggttgggataaaggaaggtaaaccaatttttagatatggtggagattttggtgaggccttacatgacggtaatttttgtgttgatggtattgtttcgccagatcgaattccacatgaaggttattatgagtttaaacatgaacatagacctttgagattggttaacgaagaggattatcggtttacattgaagaatcaatttgattttacaaatgcggaggatagtttgattgttgagggagaagctatttatttagatggtgagagaaaggtgtttaatattccattaactgctttcgcgcctcatataagccaaacttttgatttaagagattatgtaacgcttgataacataagtagtttgatgcttcgttataaattaaaagaagaagaaagctatagagataagtattttgaggttggacatgatcaaattatttatcaacgtcgagcattaccatatctcaatgaagaaaaaatggagtttcaatgcaaagatatggaacattcgattaatatttcggtaggcaacaaatatgcatatagttttgacaagaaacaaggatgcttaaaatcagtgcttcacaataatgaaatcattttcaataacaataccgaaactaaaatttggcgtgccccgatagataatgatgcatatattaaaaaagagtggttatattctggttataataacattcaaacacttgtgacaaattataaaataattgaagatgagtctaatatcagtctcgtttttgaaattaatatagagtcagaagccgtgccgccagttttgaaaggatcacttacttggacggtttatcaagatggaaaagtaaatgtagattataacttagaaaaagataacaacgcaccatttttaccaagatttggtttactaataactttaccttcaacatatgaacaaataaattactatggaaatggtccaatgagtagctatcaagataaagggatagcaacatacttagacatgtttgaaacaacggtgacaaataatggtgatgtgcatattaaacctcaagaagctggtagtcataatcaaacaacaattatgaatattaccaacaatgagcatacgcttactatcactagtgaagatacattcagctttaacgcatcacattattctttaaatcaattaacagaggcaaaacatgtggatgaattggaaatagaaaataacacatatttatatgtcgattatgcacaaagcggtataggttcaaatagttgtggtcctgaattaaatgaggaatatcgattaaacaataaaaagataacgttcaattttgatttgaatatttattagaataaaaattcaaatttataaaaagttctaatcctgatagattagaactaattatttatggattttagctaggccgagacatgattaaatgcctcggcttagttaatgatatggatagtatatgaataaactgaaaggacaagtacaacttttataaattattacgttattgaagcggataaaagatatttaaattatttaaaataacttattgctatatgattattttgatttttgttttctaccaattagtagtaaagcaacacctaaaattaaagatgaccaaagtggggcatggttttgactttgacctgtgttagggagttgttgtttattaattgaatggttgccttcatttttagcttcgggatgttctatttcagtatttgttgcgataggactattcatatttataatcttttgatgatttatttggttagtttttttgtagctagctgatattgattatggtttagtcgtgtattcgcatcactcattttcaatgtatgattagatgcttcgtttacaaatgatctagaaattttagaaatgtttaatgtcgcattattatttaaatgcgttggtccatgatggactgctactatattttctgaatttagattatccgaattatcaatgtctgtagtttgattgatagcaggacttttgccaatgttttcaatcacattatcttctatatttgttactgaagttacactatcattatcttgtgtcgctacagtatcctcctcatcatcttgtgtttcaacatcggtattatattcacctttcgtttcatctgtatcatcatgttcatcactgttattagattgttgtgcattatcagtatcattttgtccgtccgggtgtgtttggtcaaaagtttcatcaatttcatttaattcaaatgtagatgttgttcctgataactcgaatgacaccattaacatgggtttaccagtagggctgtcttctgatgatacaaatgtaatgccctcgggagagatatctttattttcttcatcgtataagtattgtgtgaattgaggtgtagttgggtttgtaatgttataaatcatcacaccgcctacgcgttctaagccaacaaaggcgtacgtttgattgccgatggttccaacttcgatggattcaacctcaggacctttgtcatcacttcttccgtctacttctatatcattaaagtcttcgtaattagcattaaagcgccctggtaaaatatcttttatgcgttgttcgatgtcgctaccgttatcgtaaaccatagataaatcagagccttttaatatagaaaatgagcgaccgctaaacgatacgagtgcattatattttccatttttatctctaaatttatgagaagttgtcacttttaatctacctaattgatcatcatcaaataatccattggctacaagtttatctagttctgcttgtgtatagccttcatagtatttagcatctagtttgatatcgtctttaatatctttgacacggacttcttcactatagccatcatagtcttgtgcatcaccttcattagcaattaataagtatgtttcgccattatattcatatgcggtaataccatctggttgtaacatgccgagcacagggacagggcgtaatgcttttttaccatctttgtctgaagggtccatagcattttctggtaaagaatgatctttataaggcaaaccttgtacttttacgaattcacctttttcaatatctagtttcgctatagcactagattcttgaattgtgacataagcgtatttcccatgttcatcaggaacgatgtactcaggttctaaatttaggtaagctgttgatttatcaggacctaattcgcgaatagagtcgttcatatgtgcctgtgtgaggggaacggtgtttacatttgtttgatttaatttagatggtgaaccggacgtatcaataattgacacagaaccttctggattctttttgtttaaatgtgagaataaaaagaatcattagaattaaaatttaattaattaccgagtgatgaaaaaatagatactacattctacttttaatattgtataatatgaaatatattaatatttatataattaaaatcgaaagaggagcactgtattttatgattagaattttaattccatgttttaatgaggcatcagtgctagaacaaacatatgccaaattaactgaaattatgcaacgagatagtatcagcaacaattataaatatgaattgctttttatagatgatggaagtaaggatcgcacactagccattattaaagcattagcacagcgagatcatgcggtaaagttcatatcattttcaagaaatttcggaaaagaatctgcaatgtatgctggattatgtgcgagtactgaagcggaagcattagttatattagatggtgacttgcagcacccgccaacccttattccacagatgattgctcattatagagatggtgaagaccaggttgtggcaaaaagagatagaacaggtgaacacgtcattcgcaagactgtatctcaattatattatgcagtaattaataaaattgtagatgtggatttagaagacggcgtaggggattttagattattgagccaacgtgcgatcagagaagtagtgaacttaggagaatacaatagattttctaaaggtttatttgcttggattggatttgaacctaaagtgattgaatatgaaaatgttgtgcgtgccgatggtgagtctaagtggacgtttagttctttattgaattatggtatagatggtctcatttcatttaataataaaccgttacgtgccattttatactttggtttatttgtgtgcgcgatgagtttcctttatatattatttaattttatttatacagtcagttatggtgtttcgacgccaggttatttcacaacgattgtcgcagtattatttttaggtggtgttcagttaacatcattaggggtcattggagaatacataggcagaatttattatgaagtaaaacaacgaccgctctatatcatacgccaaaccaatttaagtgattgcgaggtggactgaaatgagagctttacatataaataaaatccatctaatacttacaggattatttattttttatatactaatggctatttttacgccattaacccatgatgattgggactggtatagtcaatatggtattcaaatgttgcaagaacattttgctaatttaaacggccgttatcttggtaatttgtttgaaattgtagcagttcgatttgactggtttaggtggttggcgtatgccgtatttagcatgttgatcatatgggtcatcagtcaatttgttaaacataaacagacttctatcatttgtttagcggcatttattttaatggtgacaatgccaaatgaaatctataaacaaacgtatggctggtttgcaggattttataattatgtaccagcaacgctgtgtgtattatttattctatggtttattgtaacggtactattttaccggaacagtcataaaccaagtacgaatatcattttttattgcgtgtgttttggtggtcaatttttcattgaaaatgcaacattatttaatacattaatcatagcaatcgcacttgtattacatatatatttctataaaaaagcgtatcctaaatttgttgtaggatggttcatttctgctttagggacaatcattatgtttttgaatccgaactatcgcaaaatattttttgaaggtagcgattatcaacaggtctctagtgatacgggtatcgttgataaagtttataaaacggtaacaaccatattgccggattggattttctttaatcaaattgtgattattacgataatcgttggtatcttacttgttatgttgtataaaacacgacaaatgacgaaaacatatacaagtagatattggttcatcgtatgtggcttaacgctattaccgatatattatttttttatttttaaacaatttgaattacaccattttcacatgattacacttactaatattttaaatactatggtatgttttatctttttgtgtgcattgatcttggctatccatacggtcatatctcaaaaggaagttcgatatacgctttacttattaatcgcgtcaatcatacttgtgtgtggtcctttaatcatcgtatcacccataggtccacgtaatttttacacagtatatgcaatttatgttgtcatattattaattttacttgcgcaactggaagtgtttaacaggaaatcagaaaagtggattactggattagctatcctttgtgcagtgatgtatttaggggtattctacaatattcacgctgcaaatgaagcaagaattagtcagctaaaagaagccgttcatgcagattctaagcaaagaatttatagtatggaaaaattaccttttgaacattatttacatcatgccacaccaacaagtgctaagtatcaaacgttatttaatgaatatgaaggcttaccaaaagatacgaaagtgaagtatgtgccctatggcagtattagtaaccaaaaacaatcaaaataatattgtttttaagtacaacaaacaaaataaaaagcttttatccgatttttctgaaaataagtttgcaatacgtcgccaaagatggttaattaaaggtatacttgaaataagaggcatgtagcagtagtacttgggatttatgtggtttaactgagcaacaagtgcatgtagcagtagtgttgacacaatcgcatttggacgtgttacttcaaatttggggctaatcatctacgttttagatgattagatagagagacagttatttatgtattggacaatggattagttataatttgattgtagaaattataaaaagaaggtatttatatgagtgaaaaagaaattgaaaatcatgaacttgagcaattgaataaggaaattgaagcggaattaaacgcatatgacgctgataaagaattccaaaaagaaaagaaacaatttttaacgcttacatttatttgtaaattgattattgtgttgttaatgctaatggggttagtgaagttatttatatagagtcatagacaaatgcatatagaggtgaaataggtgacaatctataatattaattttgggattggctgggcgagtagtggtgtggaatatgcacaacgttatagagcgcagttattgagaaaatgtaatgaaacgataaaatttgtgtttttagattttattaagaatgaaaacattcaaacattgactgaaaatataggatttaaaaatgaggaaatcatctggctgtatcagtattttacagatattaaaatagcacctacaagtgtgactgtagatgaaattatcaaaccattgtattcagaaatcactaaagttgaagatcaaggtaaaactcgaaaaatccattttaatcacaatagtaattatttagtatgttatttaaaaaatgaagatagtgatgttgtagatagagtggaatacatttctagaggcaagttgcttaggagagactattactcttatgtacgcgttttgtctgagtactttgcacctgaggataattcggccaaattatatatgaggtccttttataatgaggatggatccattgcatataacgaatatgttaatgatgaggaaagtatgtttgtttttgaggataatattctgtacggtaagcaagcattaatagcttattttttagaaaaattgcatttaacagataaagatatgttgattgtagatcgctcaaaagatattggacaaacggttttgcaaaataaaggatcagcacgcttaggagttgtgattcatgctgaacattataatgaatcgacaacaaatgatacatacatattatggaataatcattacgaatatgtgtttatgaatgcacatgagattgatttctttattacagcaacggatattcaaaatcagttgttagcacaacaatttgaaaaaaattatcataggaagcctaaaatttatacaattcctgtaggtagtttaagtgcgttagtgaagccaaatcgtagaaaaccttactcaatcattacagcctcaaggctagcgactgaaaaacatgtcgactggttagtaaaagccgtattgaaagcgaaagcatctgttcctgaaataacatttgatatctatggcgaaggtggccaaagacaattattaagtaaactaattcaagaaaatcatgctgaagattatatcacattaaaaggacatgttaatttaaatcaagtttatcaagattatgaacttttcttatcgggttcaactagcgaaggtttcggtcttacattaatggaggctatcggttcaggtttaggtatgattggttttgatgtgaactatggtaacccaacgtttattaagcatcaaaaaaatggttatttaataccgattgatttaaatgaggataaagaatctgaaattatagatcaccttgctgaaggtattgttaattatttcgataatgacacaagccgatttaatcaagcttcatatgaaatcgctgaaaactttacccaaccggttgtcgtacaaaaatggaacaatttgattagtgaggtgctatatgattaatttatttgatgtttttgataaaaaagccattatcttatataaatcttttaaacatgctggtaagcaacgcaaaacaatcgttattgaagaaaatggatttttaccagatgatatattaacaccttacgcttttttcgcgaataatcctgaaacaacttcacaacctttattttttaatgaagtaccgattccaagattttggacaatagaaggtaataataatactgcctttatcaaaaatttggatgaggtgaaagcgagaattatttataaagcaaattataaacatagaattgttgaacgtgtagaatggttaaataaacgcgggcatacgcaatacatagattattacaataaagtaggtaagcgatacgcacaagtggtattggacgcaaactcacaaaaaagcattttgaaaaggtattttaactataataatgaagtaatgatggtagaaaattttgtgactaatgacatcatgttaacttggaaaaacaaagcctatttcttccattcaaagatacagtttgtcaatttttacttagaagttgcgcagcttgagtctgaaaactttatgattaattcactatcgatttcttctgccgtattaaatggtttgtctgaatctggaaacgactctattttttggcagggagatattacgcctgaaattatgaaacatatggaaaatgcactggcaaaagaaaaacgaaattttaaaattattttgcctagtccttcagcgtatgaaaaagtaatagagctcatcgatgaacaatataaaaatcgtatcttccaatcaggatatgtttatagatttgtgaaagagaatcgtcattctaatcaggtattaactttgacaaattcagaccaaataccgcatttagaagaaatcgtacaagcccatccaaatctagagtttcatgttgcagctttaacagaaatgtctatgaagttattaagcctcaataaatatgacaatgtaaatttatacccaaatgccaaaaggcaaaaatttatttcgttatataaatcatgtgatatttatttagatataaataaaggtaatgaaatattagatgctgtaagagcggcgtttgattacaatttagtcatcttaggatacaacgagacatctcacaataaggatgttacgccagagaacaatctttttgaggaagtacaatttgagatattaagtagtatattgagggatattgttgctgaaccatctcatttagatcaaaggttgagacaacaatggcaacaagcaggttcaatcagcaaagctgaatttatccgttcattagcgcaataattcattttattacagaacataaaattttaaataggttaccaataccaggagatataaaggtattggtaaccatttttttatttatttttctctagtatcacttgtttataatcatttatatcaatacgtctccaaatttgctttttaatgtcttgaatatgttgcattttattcatattacttgccatgtttttaggttgatactgttcccatttttctaattgtttaaatagtgtgtgtagagatctcataaaaataaccgcctttttaatttttataaataaaatagcccttcttagataagaagagcatccacacaacttcccatctttcaactcaatcgtcatactgagttgttggatttagcacatcgcatatgactgctgttgctggagtttcatagggccaagtccctccactcactcttaataagagaactattttatttaaacatcattatagcaaatgaatgtaaaatgacaaacaaagtcatacaatacactattttcttcggcgtgcgtatttatagtaattgatgaatattaatactaaattgaccataccaatgattaaaccagttaataatgagaaaaatgcaagaataactagaaaccagggttcttgtaacacaccatcttgagagacatgtgaaggtaaacttgtgaaaagcaatgcggatactatagcaattaagataaatatcatacttaatatacttaagcgaatgcgtttcacaaacttcgtatcattaactaatttatcctttaccacagaattacctaagattaaatcatctagagataaattaaaggttttggcaatttctactaacatttcaatatccggtaagtaacgattattctcccatgcagatacagtttgtcgtgaaatatttaattgattgccaaattgttcttgggtcagttgattttcttttcgaatcattttaatttgagtgccaaaattcatatgttaaatgtgttccttttaaatcgtattttgtttataaaaagtgtggttaagcgaacgctagtgatactttacatgctccgcaagttcacctagcgcgcatattttaaaatgctagcaatgctttcttttaaataaaataagcttattcaataatagatgacatcaagtaaatttaaaaatttaggaggcataataagtttatgaataaaaagttattttttgcaagtattataagtattgttttaggtgcatcgttagggattagttttcttttaattccaagttatgtaaatgaaaatggcatattgaaagagccttggtatttagtagaatctggattttcatttgtcattattggaggtttactcgtgtttttgtaataggtggttatttatgtcactattttgaaaataagattcataaatagagtggtttgaaataggaaataggctgaggcatgtttaatgttacagcctattttttgagcttatggttcaaaacgtagggattttatatggtaaatacattcaaaacagatgaattgttataaatttgcacgatatttgttatactaattgtaagcgcttactaaaaatatttagacgctttagtataaatcgtttttaaaaggagaatgcacatgaatggtaaagtgatgatggtgactggtggaagtagtggcatgggcaaagcaatggcgcaaaaatttgctgaagcgggtgcaaaagtggttataacgggtcgctcattggaacggttagaagcggcaaaagaagaaatagaacaatatgaaggacaaattctttgcatagatatggatgtgcgagatcctgaaagagtgcaatatacagtggataaaacggttgaaacgtttggcaaaatagatggtttggttaataatgcagcaggtaactttctatgtgcagctgaagatttatcatataatggatggcattctgtcattgatattgtccttaatgggacatggcactgtacacaagctgtaggaaaagaatggattaaaaatggtcaacgtggacgtattattaatatggttgcgacttatgcatggagagctggtataggtgtgatacattcagcaagtgcaaaagcaggcgtgttatcaatgactcgaacactggctgttgaatggggctctaaatatggcattaatgtcaatgcaattgccccagggccaatcgataatacaggtggatcgggaaagctaagtttatcagaagaagcaaaacaacaaacgctggatagtgtcccacttggaaggatgggtcaacctgaagaaatcgcaggtttggcaaaattcttaatgtcagaggatgcgagttatattaatggtgcatgtatgacaatggatggtggacaatggctgaatcaaaatccattttaaagtattataaaaactttaataaagataatcggtgtgcaatgtatgtagagagaagactgactgatgtctaaagggtgtctaatcgctttagaattggaatcatgacaatctcattttatgagtttacttagattgctttaaataacgaagtaagttcagattcaaaggaagacttaaatttttctattgttccatatctatgaatgaagcaacatttaagataccaactttctaaaaacataagaatcattgtagtggattcgtctttattcactgaaatttcaatactattatagtaatttgcaatgttagtatctaagatttggtgaatatttttgatgtgttgtaaaaattcatctttgaactgaaatagtgcataagaaagttgcaaataaaggcggatatatttttcgtcaatattgaaaataaaatcaaataaaaattgatgtaagttttcaattgaatattgtgtatcctcatgtgctgcttttataaagcagctaaaataattaaaacatgaattaatacaagatcgataaatttcgtctttgtttgcataatgatagtataaacttgcttttttaatatccacgctactcgcaattcggtttagtgtagttccttcatagccgttttcagaaaataaggagatagcattttcgataatttgttcttttacccctagtttcaatttaggtttgagcctccatctatatcaaatattgtcatataaaaattaattcaaaacataaattatttcaagtgtaacagtaatcattaataaaatgaaagcgattgtattaatatagtgtgtgatgtgatttgcagagaattaatttgtatggttaattcgttcttaagtatcaaattaatttttgaatagtacataaatgagattaaatctgtcttgatttattaaaaagtgctaggatgtgacaggttaatgaggaaatattatttagataggtgtgaagcatactaatcatatgttcaaaatttattcacttaaataaatttttaatctatatggctgcttaccaattaaaaatctaaaaatgtaaaactcacgaagcaaaatgccaacacctacacataatcatatgataaagagcaatgaaattgctacaaaaataatggtagcattttcaaaagttgaggtgtaactatataaagcgtctaaaataagtggatgcattaaataaatgaaaaacgagaaagtgctgattaaattgatagatccatacattattgtcttaaaatggatgcatataccaagaagtagtaaaaacataaatgtatgatatgaagtaagtgcataagtaaagctagtcacattccagaaatcgtgttctgtaaatagtacgaaataggtaaaggcaatgatagctaatgatagaatgataaatatatattgatgtaagaaatttatcgttttttcatagttagctccgatgtatccaccaagaaagaagaaaaatagccaacctaaaatgaatgtattttcacttaacggataaatggtatggaacgtgtgtgcaaatgtctcggaatggtttaataaatataaaaatgtcgtttgtaaaataatagtagttaattaataaaagatatgttgaggtgtaataacaacatatcttttatttttataaggcgagatttctttattaaccattgaaaaacatgtatagttgtcgcaaaaattacatgaatattacaaggttttatggctgaattaagtaactcatgactttcatgacagttttgagtgggtgtttatagtatataaaatcctatggcgcgtgtcattaggatgtaaaaaagtaagggggtattttaatttcgttgtaacctacatgctatttatggatgttatagtgttatttgtgagtcagttgaaaaagtaaattatctatttaaggtaattgaaattcaacattaaatcttaaaaataataaaatctaaaaattatcttctgggaggattattaataatgaaaaaaacagtagtagcatcaacattagcagtaggacttggcgtaacaggaatcgcagcaggaaattcagcagacgcttcagaaaaaggcgttgacaaagcacaattagcacaacaagctcaaagtaatccagaatcattaaatgcagcgccagtacaagacggtgcttataatataaactttaattacaataatactgattatagcttccaatcagatggtcaatattggacttggagctatggacaaggttcaactaatgcaccagcacaagaaactgctgagcaaccacaacaagttgaacaaccacaacaaactgagcaagcttcaactgaacaaccagcacaagaagctgcaccacaaactgaagaaacacaacaaccacaacaagaagcaactacacaaactacttcaagctcaaatgaatcaacttcaaatgaatctagttcaagtgaagcttcagaaggttcatcagtaaatgttaactctcatttacaagcaatcgcgcaacgtgaatcaggcggcgaccttaaagctgttaacccatcatcaggtgcagcaggtaaatatcaattcttacaaagcacatgggattcagtagcaccatctgaatatcaaggtgtatcaccaacagaagcacctgaagcagtacaagacgcagcagctgttaaactttacaacacagcaggcgcttcacaatgggttactgcataaaaaattaagtgtagtaatgaacttaagataaatatttaaagctgagacatttatgtctcagcttttttatttataagtatatcaagttggtcagtcaatagaattcttttgagataaattttgttgcgcaaaacgcaaatgtgctgtttaaaacgcatttagtaaagtagttaatttgaatgtttttaaatatatatagtaagcaatgttaatgttttctggagtgcaaatagacatcttttttcacactaattacaaaacgattacatccacaaaagtgtataaatacactacaaggtgtacatgaaaggatttttaggtagaaattcctgatttgagtgtaatatataacgtaattaggatgtaaaaaagagcttgtttttttaacttcactgtaacctacaagctttttataggtgttatagtaggaaatacaaattagttgtaaaaagtaaacttatttattgacggttgaaattacaagctaatttattaaattttaaaaatacaaacaatctcttaggaggattattaataatgaaaaaaacagtaattgcatcaacattagcagtaggacttggcgtaacaggaatcgcagcaggaaattcagcagacgcttcagaacaaggcgtggacaaagcacaattagcacaacaagcgcaatcaaatccagaatcattaaacgcggcgcctattcaagatggtgcttataatatcaactttaactataataatacagattatagtttccaatcagatggtgaaaactttagctggagctatggtgaaggttcaggcgaaggatctaatgcttcatcagaacaagctacagacaatagttcacaacaaactgctgagcaacacaacaagtagaacaccacaacaaactgagcaagcttcaactgaacaaccagtacaagaagctgcaccacaaactgaagcaacacaacaaccacaacaagaggcaacaacacaatctgcatcaagctcaaatgaatctagttcaaacgaatcaagttcaagtgaagcttcagaaagttcatcatcaggtgttaatgcgcacttacaacaaatcgcgcaacgtgaatcaggtggcgacatccatgctacaaatccatcatcaggtgcttctggtaagttccaattcttacaaagtacatgggattcagtagctccagctgagtatcaaggtcaaccagctgcttcagcaccagaatcagtacaagatgctgcagcgcaaaaactttatgatacagaaggcgcttcacaatgggttactgcataaactgtaagtcataattttaaaaataaagtataaaaattaaattaacatgataaatttggtcccggcttcttaataaagaagtcgggttttttgtatagttaattgttggttttaatttttaggtaggatatggatttttgaatttgttcattcaattgagtaagaaataagatgacaatagtactaagcagcttggattttactttaatgttttaatggcatatctttgaatgattaaatatgcaaatgggtaacgatgtagtaatacttgattacatttagctataataattcaaattagggagtgatgatgaatatgagaaaacttatagtatttttgcatagtacgctagatggttttgtagagggtcctaaaggtgcaatggacatcggttgggttgcctataatgaagaattggaaaaatttgcggatgatgtactgagtaatacagatacgattgtttggggacgtaagacatatgaaatgatgtatgattactggccgacggtaccatctgatgaaaatgcaaatgagcacgaattgaatcatgctcaatggattgaaaatgttgaaaaagttgtattttcaaaagcattgaatcatgtagaatggagaaactcaaaattggtgaaagatcatgttgaagaagaaattaataaattaaaacagcaagaaggcggagatattgtcgtgttaggcagtccaagatttgcacattatttaatgcaacttaatttagtggatgaatataaaataacaatatcgcctactttaataggtaaaggattaccgttatttcaaaatattcatgataaagttgatctcaaactaataaagagcgagacatttgaatccggtgcgttaggatgaaattatcaagttttaaattaaatgaaaagagagtaaatcgttaaccaatatattgaatcggtttgatgatgttactctcttttttctatagtagtgagatggtttttacagacgctatcgtttaatcattactcaccgtgatatgctttttctaaagtagcgatgtcgaattttttcattttcagaaaagcttctgtgacacgtttaagttgttcaggagaatcatgtgccatcatttcatccagatgttcagggacaatttgccaagatacgccaaatggatcttttaaccagccacattgttctgcttcagggacagtggataatttctcccaatagtcatcaatttcaccttgatcctctaaggtaaccataagtgaaatgccttcattaaactgatagtcataatcataagcactatccatgcatgtgaaccattgattttcaattttaaaacgtgcatgcgccaactgagaagttttatttggttcaagaccctcaggataatagaatttatcgcctggttcactatttttaaataccttgttatagaaatggatagcttcttcggcacgtccgacattttcattcataaacaatagtgtgggttctatgcgatgtgtaataggatcattagtgactaataattgccaagatacatcgtattgatcttgtacccatccgtacctttcgctaaaatcatattgatttaatggcatgattgcttttccattttcaactaatttattatagaccgtttctaataattcaatttcagattttttaaagagaacagtgaatgaaatggaagggttttttacgaaataagggccagcgttgatagccataaaacgaaaattaaagatattaaaaattaattgttgcgcatctccggaaggtgtatcttgtaatgtgacttttttaataatttctgtttctgggaaaacatttttataaaaatcgactgcttgttcagcttcagtatcaaaccataaatgtggcacaattttttgattacgcatcatgtcatctcctgtatttttatatagatgaacgtgaattaaaatccatagcgaacaagctgaaactagttgagaaaattgacgtatatggtttgggcattagctacagtttggcacaacaatcaacttttaaatttcaatctattggtatcgaaagtaatagtttcgatggtataaatgaacattatatttctaatttaaaaaatacggataagaaaatagcgattttgatatcaattactgggcaaaatcctacaattattgaaatagcaaagtatttaaaagcacgtggtatatatacgatagctatttcatcatcgataaatacagaattaggtcaagtttgtgatcaaatatttaaatttagtgatgataaattgattttgagtatggaagtattaccaattattatttctgtacaatatgtcatagatattttattttcaatattattaacacataaatatgatcaaaacattgaaacatctttaaatgtgattaaaaatccatttgcataaaatgaaatctattttcatttatggatattcaatagtgataaaaaatgaaaatagcaatcaatttcgccctcgcttatgtaagggctttcttcgttgtagtttcatcattgtatattgaaaaggatatcctacagtatctactttctataaatggggtgatgaaaattgaattatgacaatttgggaaaagaaattattgatttagttggtggagaaaataatatctcatcattagagcattgtgcaactcgcttaagatttgtactgaaagatacagatcaagcagataattcaaaaataaatgaactgcctaaagttttacaagtcgtagaacaaggtgggcagtttcaaattgttattggcaatgatgttgcaaatgtatatgacgcaattgtaaaaaattacagtattggtcaaacttatgctaaagaagaaaacgaatcagggaaacgtaacattataaatatcatatttagttatatatcgggaacgttttctccgctattacctgcactcgcaggctctggtatgttgaaagaattagtcgaaatactaaaatcattgaattggattaacgacaaaggtgcgacatttgcgattttaaatgcaacatcaaacgcagttttttactttttaccgatatttattggtatgtctgctagtaaaaaattgaatgtgaatccatatataggtggtgtgattgcagcgtcgttactcgaaccatcgtttactaatctccttaaatcagaagaaaatctaacttttataggtctgcctttggtagttactgattttgcttctacagtgttttcattattaattgctattgccatctatgcgccacttgaacgcttgcttaaacgatgggttccaaaagtattgcaattatttttagttcctacgttaagcctcattattatggtgccattaactgttttagtatttggtccttttagtgaatatgtgagcagtggcatcggcatcgattatatgcttggtttttctagaatattaactggggttatcatcgcatcggtttggccattcttagtagtactaggtgttcattgggggttagtccctatcatgatagataactttgctcatggtggagatatactcatagcaattactgctgcttctgtttttgcacaaattggaattgcgtttggtgtcgttttacgttctcgaagaaacaaagatttaagatcactatctataggtacaacgttatcaggattattagcaggtgttactgagcctattttatatggacttattttatggtataaacggctcatacctattgtactcgtttcaggtgccattggcggtgctataatagctatttttgatgtgcgagtgacaacgtttgtgttaaataatttatttactataccagtatttaaaccaatgtacggctacattctaggtattgcaatcgcattgattattggtacgattttaacatttgtgttcggttttgaagctaaaaatagtgaaaaacctttggaagctaaagaaaatacaaataacttgcaagaaggtgtatcgacaatgatatttgcacccttatcaagagaaattgtaaaactggaaaatgtgccagacccagtattttcaaccgaagcaatgggtaaagggattgctattgaacctgaaaacgatacggttttatttatgtgaatcgttatgataatttcgagggcactttcgagaggtatagaaagaaaagtttttactggtatcaaaatgtgattaaaacaaacggcaatagcttaataagcaaataaatagttaatgaaaaagagtttcaaataattatctcaaatgatcaaattagtgaaatataatttctaaatgagacgatgagaacatttaaatcatgattaagggtagaaaataatagtacaattgatggagggattttaacgagtaaaacaattagattaatcgcaccagattggcaatcaggaggtagagcagcctattatcatgggggcacacttattaaactggttaattcctaatgattctaaccaagaagcgtttgagattaaagtcgaagaaccagatgaagacgcattagaattagaaaatggtgtatacgggcagtctcaaataataaataatgtaaagcaagcacaagatattttaaatcaagaacaaccagataaagtaggtactttaggcggcaattgtatggtctcacaagcaccttttgattatttaaatcaaaaatatggtgatgaactcggtattgtttggattgatacacatccagatatttcatatcctaaagacattacaaatgaacacgccatggttgtagctaatttacttggtgaaggcgatagtgaaatgtcgaaattggttaacgcaccattaaaaactaatcaatttttatacgtaggtttacaagaattattagattttgaagcggaaaatctagaaaaattaaattttgattataaagtacaaggcacagaaagttataattatgaagaaatacaacaatggattaaggaaaataacttttcgaaaatagccatccattttgatattgatgtcttggatccaaatgagtttcgtgccacttactttgcggaacctcacattgaatcgttcccagcagcagctggacaaatgtccttgtcgcatttaaatgacatactaaaaggcatttcagaaaataatgatattgtaggctttactgtagcagagtacatgccatgggatgaaatcaatctgaaaaatacattgaaagatttgaatatattccattaaataaaaagaaccgttgctattcaatatagcagcggttcttttatagttatttaactaattctttaaaattttctaagcgtttcgctttttcttcatcgctaatgttatgtttttttacataacggttattttcgtgttttgcacactcatgtgagcaagcgcctaaataacgcgcttcgttttcttctgatacaaggatttgtttgttacattcagggttactacaattgatataacgttcacaaggcgtaccatcgaaccattcttttcctactacagttttatctacatgattcacttctacactgatacgttcatcgaatacgtacatttttccgtcccagaattcaccttttgtttcagggtctttaccgtaagtagcaatgccgccttcaagttgactcacatcttcaaagccttcttttagtaagtaaccagagaatttttcacaacgaataccaccagtacaatacgttacaatttttttatccataaattgctctttattttctttaatccagtcaggtaaatctctgaatcttgtgatatcaggacgaactgcaccacggaagtggcctaaatcgtattcataatcgtttctagcgtcaatcacaacagtatcatctgataataatgcttctctaaattcttttggtgacaaatagttacccgtaagttctctagggtttacatcatcttcaaggtctagagcaacgatttcttgtctagggcgaacatgcatttttttgaaagcgtgtccttcggcttcatccactttaaaagtaatcccttggaatctagcatcgttttttaatgcttccatatatttatcggtagcttcgactgtaccagaaactgtcccattaataccttcagtagatacgagaatacgacctttaagttctaagtctttacaaaatgctaaatgctcagttgcaaataattcagggtcatcgattgttgtatatttgtaatataataatactctataatccataatactaatctccttttatttcttgttcttataaatttatataaaatgttggtatcattttttcgctaatataaagtatgtgagtatcttcaatttaataaggtttatttattttttgagcgaaagcataaaattatcattattacattataacaaaaaagggatattattcaatttattaatttaagcatcttcattatttttattatattaagtaaagatttttgattaatgtaataaaaaatgctctctacaagtaaatcttgaagagagcaagttaatatctattatgatttctttttatttgtaaatattaatgcaccaattaagctgattgtgctgatggcgaaaataatgttcatgatagataatgtttcgataataacaacatctttgccga

SEQ ID NO: 36 - DNA, 58815 bp, Staphylococcus saprophyticus
  misc_feature (28518)..(28518): n is a, c, g, or t
gtcactgctacttgttgcaataacttctgctcctaatgctgatgctatttgaattgcaaaagtagaagttatttctgaagagttcggtaaaataaaccgattatcttttaaaggacaaatcttttttgtttctattgattctatgatggagcaaataaactttgagattgaaaatagtaccatagaattaaacttcaataatgcacacttatgggatgattctgcagtagatgcaattgacacgatagtacgaaaattcgaagaaaaaaataatattgttcgtgtagaaaaattaaattcagatagtcgtaaagttgtttcagagttaagccaactaaatgaaaatcatttaaactaaaggagcgttatttatgtataaatcaattttattagcagcagatggatcagagaatagtttgcgttcagcaaaagaggttttaaattttatagatgataatacgattgttactattcttacagttgtagatgttgaggaatcgaaaacagatgttttacatggtaaacaaagttccagtttgacgaatgaaagagaagacaaactctctcatatcactgagttatttgtagagcataatgtaaaatatgaaatgaaaattgcacatggtgttcctgggtgaaaaatatttaaattccgatttacctcttgaagcatcacctggtgtaaccgatgcatccgatttattagtcgataaagatgaagacttttcattcattatgtatggacctggattaatacatcaagcacaccaagttgatgaatatgttgaaaaagatgtttatcttacatttatagatttatatacagaatttttccctacttatttaaaaaacatgaaataatttattaacaagtaatccaattactcaacttttataatacactttataaaaacgacacttctgcaaaagtcgtaacagcaatatacgcgctacaaattttcacttatcagtgtctattttgtagcgcgtatattatttatgtaaatattttctgtttgcatatttgatgcggttaatttgtatgatgatatttttggtattgctttggcgtcataccgtagcgtgctttaaatacttttataaaataactcgtagttgagaatccacaagccatagctatttctgtaatagtagataacctatctttatcgaggatagatttactttgttctagtctgtatctcaacagatattcaaatggcgtttgttttacatattttttaaataatcttatcgcttcagcttcgcttaaataaatattttgactcagatgtcctagagtgattttatcttgaaaatgtttatgtatataagacatcatttgctttactctataatcaaaatggtatgttaattccgtaggttgttgtttcatatattgcatgagccatttcactatcttataaaaataggtcatgatatccagctgaaaatatgcctcttgtttctgatatattgtaccaacgctttcaatacatgctagtaatgcatgatgactcaaatttttgtgagataaatatatataaggtaccatttcagcttgttgtgatatataacttaaatatttatactccatataactcgaaatatttggtatttcaatattccaacaataaaactcacttatatgttcaagcccctgtatctcgtgcacaacattcgaattaataaatatgccatcacctgtatttaacacgatgtttttgtcactaatgcgaatagtcaatttaccacgtaatacaaacacaaattgcaatgcactgtgccagtgtatgggtatctgttccataaacgcttgatctaaccttgttttcaacacaatatgtcgccaatattcatcagggtattgaatgcgctcttctccattatcttcaataattatccctttatacatagcctatcacctcaatatattgataattttaaaccatttatttgtattatatcaatattaagtgcgttatattttaatatattaatacatcgtaggtgataaaatgaaacaacaatctcgttttctcggcattatattggcaatattaggcgcatctttttggggtttaggtggcacagtttctgattatttatttaaacatcaaaatatcgacatcaactggtacgttactgcacgactcttaatcagtggcttgctactattaacaatatttaaaatacttaaccctaggcagtccatatttatagtatttcgtaatgtaacgaatacaatacagttacttatattttcaactttaggtatgctacttgttcaatatgcttacatggcatcaattaactatggtaatgctgccattgctaccttattacaatacattgcacctgtttatattactttgtggtttatcatacgcaaaaaagaaacctttaaattatttgatgttattgcaatattattaacactcacaggaacattcttattattagccaatggttcccttgacagtttaatggtttcaagctcgagtatgatttggggtatcatctctggtttatcgtaagccttctatactatttatgccagtaatctattatccaaatttccatcaatactcgtcgttggttgggcaatgctcatttctggtatcttaatgaatttcaaagcacctatttggcaattcactatgtctcaaatagatataagtgtgattttgtatttagcctttggcattattttaggtactgcaatggcatttttcttctttattaaaagtttaaattatttatctgccaaagaaactacactttttgggacaatagaacctgtaatggcaactgttgcgagcgcactttggttaaaagttgttttcctaccatttcaactattaggcatcgtgctcattattattctgatattagcactttctttaaaaaaggataaagaacgataaatatgtattgtacatcagtgtaaaccattacaacacaactactcaatcttatactaaagaggactcatccatcatatacggacgagtcctctttaactgaggcaatcatactattttgaaggtgcatgcttgcttagaacctagagcataacttgagctgtcaatctcttactcacactcatacattgctccctcggcgtcaacagattatgaagtcagtgacactacctctatcatgtatatttaattttgtttaataattttgttgatcttagcgataaattgttctttttctggtattgggaaaataggatgtatatgaaataaattatatcctggcataaaatcatgttgaatatttcgagcattcaacatatttgataatttcactgcgtctggatataacgtttctttcgtccctattgaaattgttatatgacccagcccttcaatatcaccaaatataggagatacgcgccagtctgtcagatcaaggccattcgcccataattttataaaatatttacttccgtcgattgcaagcattgggtctattttttcataaatttttgcttccggatttgaaaatgttgcgtcaagcactggagatattaaaacgatgttacttggttgtgctaagtttaacgttttaatatattgtgcaaatgataaggctatttggcctcctgcagagtcacccattattgtgagttgatgaggattttcgacttgtttcagtaattgtgtatataatgtttccaacagagtgaacgtctctttataggttgcatgtggtactttaggatatataggcatgattactttagcacctagttcgccagccagtgaatctataaaatcaaagtgatattttaatggattttggaaccaagcaccaccatgaatatacaagacaactggttgttgtctatctttgttgtcattcacaatatatactgtagactcttgaactgtagtcgtttggacattgtggttgaaataataatccgtaccttcatataatgctttcgtttcatctttaaccttctctaaagcttgttgcgcattttccacatttaaaaatgaacttttcatttttgttgctctaataatgatttcttctaaaaaacttttgtagctacgtttttctttaacttttgcatatacgtatgatgtggcaacacctataccaacaatagtggctatttttctaatcacgttaattatcctcctcgcactttcttatacatatattttataacaaattgagcaatcattttaaataaaaggtactatctttatagtagattataaagtatatacgcaatttcctgtttatagaaaattctaatgcatcatgctcagatttgttaagcgttaaattttaatcttggtttagcatcattgccatatataattcatcaaaataatgttcttccataaaaacagattcatgcttaattccctcaattttaaaatctaacttttcataaaagttaactgctggtttattcgaagtaatcaccgttaattctaaccttcttaatcctttgcgttgtgcccatttgattgtttcattaaacatttgcgtcgctaagccttgttgatgtaagtcattgattaagccagtcacaatatatccaatatgtctaactttagctaacatactgatatggacagataaataacctaatatttgattatcgtccgttttaacacctatgtaaaaattcctttttatatcttcactcagtttatctttatcaaaacttctttcatcaggcaaataaagcatatattgcgtttcttaatctatctttttcatacaattataaagtgcttctgcttcatttggacagattctttcgatacgcataaacatcccccttaatgctataaattaactttatcatacattactttttataattgcgatataatttatctgatttttcttgtttcaatttaacacaacttttttaattaaaaataaaagcatggaagtgtgacagaaatcaaattttttaatagagatttcgtagtcccaactatgcaatcaaggcaaagatgacgaggataaaggtttacttgagctaaagctcatgcataagtctcactagcatttttacgtggcatacataggcttttgcaaaagaacaagtgagacttaatattttcaattcagtcatctactgcctaaacgaaaaagagtctgagacaactatttatgtcccagactcatgcttcgttatatcaacgtgatggttgtatacattttttatatatagttaatacaaatctttctgttataccatgcttttatacatcaaagtcagttgatgttcaaattgttgcatatcaataaatcgaccttgacgatgcatttctttaccattaaagtaaattaaatctacaggcacagtaaagatagataattctcctgcaatctcctctaattcactttgattaatcacacctaatggaacatcaggaaactcattcactatacccgcaatttgaggtaatacagcatgacatacgctacaatgatctctcatgatatgaatgactacaagcctatgctctgcaataaattcatgaaacgcttctatcgatgttaatgtttttggcattttgaagaccacctctacaacataaattgaatatcattatgtactgtattgctttggacaatcaattattttgctcactgtaatatcatatttacactttttcacatattatgattagcttaaaatcgtttgaaatacttccggcaatctcgttacttttttcttttgtaaatcaaaaaatgtcccactttgtttgcctatacaatgcactgcatcctctgattcaatttcaaactcaaattcccaacgtagtttacttgcttttactaaataacaacgtcctacgggtttatcatgtatggtaatgggtgttttgtattctgcttctgtattcattagaataggcgatatttgttgattcatcatatcagaatatggcatatattgattaataaagtcagttcgtaaatcttcaaaccatcttatatatacaatattacttactatgcccatcgcatcaatatcatatccatttacttcaaagtttctttcagccactaattttctttcagtcataatcctattcgctcctcaaacaacctttaatttatctatcctctatattataagtatataactagcaaattgcatttgtttgagtttattgttaaaaatgcgattattctttgtaaaagttaaatttactttaataatgaaagatctattttatgcaacatcgtttgcaaacgtaaacgtgtctcttgagtatagccttgtagtccacccgtatgtataaatagaatgttgtcttgattatcatacgcaccagattttatttcatgaactaaacctctaaaagcttttccagtatatgttggatctagtataatgccttctttttgtgcaatatcgatataaaattgtaattcttcgtcagttgctttaccatatcccagtccaatataagcatcgtttatcgtaattgtctcgtatgattgaattgtttcatctaattgctttattatctctatcactttatttttgaatgtatgtgcactttggtctactgcataacctataatttgcgtagtttcacagttaatcatttgcccataccaaagaccagcatacgtaccaccagaaccaacagcaacattgattgaatcaaaatgtactttcagctcatcctgttgctttatgatttcattatacgcattaacgtaaccatgtgttcctatccaatccgaagcacccactggaattaaaaatggagttttcccttgtccttcaaatgtcttatatagcttatccatcgcatcttcccgagaacttgttggttcgatgatatgtatatgcgcacctaacattgcatctaaaaatagattcccttcatattctgccatctctcctcttagaacaagatgacatgatacattacacttagcacacaaggcagctgtagcacgtgcgtgattcgatgtaattgctccggttgttataatagtgtcatatccatgatctaatacatattgcattgtatactcgagtttacgcaccttattacctgatatttctgatccagtgtaatcatctctcttaatataaatattttttcctaatgcatcacttaactgatctaatttttgaattggtgtatttaaattggcaatatctaatttattatgtaacattctttaatctccttcatacgtgtcaaatcgctaacgctttattttccggaaaatatttttcatgcttttcgttccgcttcgataatatatttttacttaagtaatcatctgtaattattatgcattgattttaaaagaagtagttctacctgcgcttaaaaatctcttttcaacagtacatagcgattcatatctctaaagcgttcaccattaaacacatcttcataatctgttgcaacaaatttaaaccccgctttttctgctactttacaactcgctatattgttaacatccgccataatagttaatttattcagtgataatgtttcaaaagcgtaatggcataactgtttaacgcattttgtaacaatttgcttccctgtatagccttctgctatccaatatccaacctctgctttgtaattagcttgatcaatatgatgtaaatctatcgtaccaatcatcgtttcctcgtagtaaatcataaataacctagccttattttttgcatgctgctgtatcatcattttcaaatatgctttttcatcttcaacggttacatcttccttaataaaatctaaaaatggagataaatgtgaaaaattacttttaatcaaatcatataaagtttccgccatatttaactctggcggtattagcgaaacattgggcattacattcattgctggtctataattcatacgttcacctgcgattatttatttgttatctctcatgatatttatattttcagaatatttcaatactttagacaaaataaaataggagtagctttgaaatctatgatgagatttcaaaattctactcctatactatatggataaactcaagtgtttcatcctagtttacaacatttatttgtcatctatcactttaatgattaattgttctgctgttacatctttgacgtcttctacagataattgtctatcctctaaattagtaataattaatggcgtaaccgtacttggtgcatgggctgttatataatctaaatcaatttgcatcagtacttgtcctttatggactctatcatctgtttctacaaaactttcaaaaccttccccattcaacttaaccgtatctatgcctatgtgtattaataattcaagaccttgatctgattctaatccaatggcatgctttgtcggaaaaatggttttcactgtaccatcgaatggcgcaacaattttaccgtcagctggtataaacccaacaccatcgcccatcattttttgcgcaaagacttggtctggcacttcagacaacggtataacttgaccatttcctggcgcataaatgtttacttcagacgcacgttcgatatgaactacttcttcactttcttcttccgtaactgtcgtctcttgaggttttgtaatttcacctttcataatcaaggacatgtcgtgtttaatttgatctgatttaggaccaaaaatggcttgcatattgtttcctacttcaagcacacctgatgcgcctaatgctttcaatcctgctacatcaactttacctttttcttttacttccacacgtaatcttgtaatacatgcatctaaatgcttaatattttcttctccacccattgctttcaatacattaaatggaagttcgcttgctgatgaatttgtaaattgtgcttgtttatcttcgcgtcccggtgttttatacttgaattttaaaattaagaatcggaagacaaagtaataaataaaggcgtacacaacacctacaggaatcactaaccaccattgtgtcttgtttggtaatacacctagtaagacgtagtctataaatcctcctgagaaggtatatcccaaatgtacatttaataaatataaaattaagaatgataaaccatccaatattgcatgcacaaagaataatactggcgctacaaataaaaatgaaaattctaatggttctgtaatccctgttaagaaagaagttaatgcagctgatcccattaagccagctacgacttttttattttcaggttttgctgtatgataaatggctaaagctgctgcagggagaccaaacatcatcactggaaattcaccttgcataaatttacctgcagttaatttactaccttcacgtatttgttcaatgaagatacgttgatccccatgaatcatttctccagctgcatttttccatgcaccaaattcaaaccagaatggtgcgtggaagatatgatgtaacccaaatggtatcaataatcgtttaataaatccaaagagaaatacggctaatccagtattcgagtcaagtaaaccttcactaaatgcatttaagcctgtttgaatactcggccatatccatgccattggaaacgctaatatgaatgatgttgttgccatcataataggtacaaaacgtttacctgcaaagaaacctaagtaagacggtaacgaaatattatagaatttgttataacaccaggctgctagtgcaccaataataataccgccaaatacacctgtttgtaatgttggaatacctaacacacttgcgtagccactcgctgcatcatttacattatcaggagatacatgtaaaaatgcacccattgttttgttcattacaagataacctacaaatgctgcaatagctgcaactccatcaccacttgctaacccaattgcgacacccatcgcaaaaatcataggtaaattatcaaatataatacctccggcaccggtcatcatttctgcgacactttgaatccccccattttgaataaatggtaagtagtgttgtaacgattcaccttgcatcgcagtaccaattgctaataatagcccggcagcaggtaaaatagcgactggtaacattaatgctttaccaatacgctgtagctgtccaaatagctttttaaacatataaaaacatcccttcaaaaatttaaaattttatcaaaaccaccaaaaagcgcacaaaaaaagacatgaacaaacagactatctcagatagtcattatgtttgctcatgcctgcctaaccagtaacacgcaatttgacgattatttttttatattatataacgctttcattaaagatacaataactaattgcaaatttattttatttttttgatttcaatctaaatacccttgtgattagtaacctacaattaatgcaatcgacataccaatacaacagataagtacccaagttaaaataatcttccaagcaaacttcaaccattgtgtatacgtgattttaccgactgctaaagcgcccattaaaatagccgacgtaggaaataatacattacttattgcatcaccatattgaaatgctaatacagtgatttgacgattaatatctaataaatccgatatcggtaccataagcggcatggtcgtcaacgcttgtcccgatccagatggaataaagaaatttaacatgaattgtaaaatgaacattgcgatgatgactaatgctgatggaacaccatttaataatgtcgtcataccatagacaatactgtctatgacttgtccgttttccaaaataacaataatccccttagcaaatcctacaatcattgccccaaacaaaatatctttcatgccatcaatcattgcatcaaatgtaccatttaaaccaagtccaccaataaatccagcaagtaaacctgccaatataaaattcgcactcatttcattgaatgaccaaccatatgaaaaaataccgtatacatttaagataattgctagaacgattaagcctaaaccacttgcttgtcttttggtaaaacgagctatatgcatggacgtaaccgtatgtccttcagattgttctaattcataaacataactttttgttttatcatgcttaactttacgcgcatataacatcactgtagtgatagcggcaattaaaatgaaaatatagatgatggaacgtagaccccatcctgaaaacatcggtaattctgctactgtttgagcaacacctacagtaaacggatttaacataccacccataaaaccactcgctgcgcctaatataaccatagcagcaccagtaagcgcatcataacctaaagtacgtgcaatgatgatcccaataggtacaaaaataattgtttcttctgctaaaccaattgaaaaacctaagattgaaaaaatcgtcatcgtcaatggaatcatcagcactttatattttcctaatgattgcattgctttatttactccattttcaaatgcgcccgttttatgtacaatgccaaacgcgccacctacaagaaagatataaaatacaatttcgccaccactcatcaatccttctggaattgcacgaaaaatatcgaaaaatgaaacaccgtgctgttgtacttgttcatacgaaccaggaacgacaagcgtctgcccatcttttttctccctggcatattctccagcaggaattaaatatgttaatatgctagaaataatgatgatcatgagtaacagtgcatatgtatgtggtgtttttatacgtaaatgcctaaagctatgtttccccatattttaacttcctctcccaactataagtacgctttaaaatgttcatttatttaaaatttgtataagtcttatttttatattatgccatttacatatataattatcagaatattgcgcttactctattatcccatagtcctaattttaatcaatgctaaagcgacaaaaaacgaaaacaaaatacaaatagcaggccgagatattattaaacatcttggcctgctattctaatagaaaatcaataactaaattattaaattatagcaacctagttatccatttttaaatattattttagtcaaataaacacgttgctacgttccgttttaactattagaagaaacgtttaacggcagttgacattggagggatttcatctaaatctagttttttatcttctgtaatagatctgtatgcccatttaccataattaattgcttcatctttaacaattttaccaggtaatggtgcagcatttggatcaacataaacatttacaattgttggtttatcttgagacattgcttcttccactacttcgtcaattctatttggatctttcaatgtataaccaacaccgccacagctttcagcaaattttgctaaatccatatctgtgaaattaattgcatattctaattcgcccgctgcttgttgttcatatttaatgaatgataattcttggttatttaatacaaaaattgtcattggtaaatcatattgaacggcagttgcaaaatcttgcataaccatttcgaaagcaccgtcaccagcaataccgacaacttggcgatttgggtaagcgcgttttgctgcaatagcaccaggtaatgcacaacccattgtacctaaccaacttgaaacgataaatttgttatttacagttaagtttaaataacgcgtagaccaaacagttgaagtaccaacatcaatagagaagatggcatcatctgttctaacttgattgatagcatccatgagacgttctgggcggataggcgaactgctgtctgccatatcttttgccatccatgaatcccaagtcgcttttctttcaagtgttttatttaagaaatcacgatttttaacgtgttttgctgaatcagttagttgttgtaacgctaatttactatcaccaatgataccagcatttacatcgaaacggtgtccaatattttcaagatttgtatcgacttgaattgctttaatatttttcttaggtaaataatctacataagggtagttcgtacctaccataatcaataagtctgcatcttgaattgtttgataagatactttcgtaccaatcttacctaaattacctaagttataagggtggtcatctgcaagaatccctttcgcaggtaacgtaacaattgttgggattttaaatgcttcgataaattcacgtacttcatctttagcgtgtttcgcacctgtaccaagtaacatcactggacgtttacttttatttattaatttagttgcttttttaacactacgaggttttggcgcaactcttgctggaggtgcagtatctacacctttgcttgtagtatctttaactttattatttaataagttgtttggaagaattaacaccgcaacaccttttttctcataagctgtgcgaatcgcttcattcacgataccaaatacgtctttatcattttcagaaatttgatgtttatatacagcaacatcatcaaccatgttactaatatcagtttcttggaaagcttttgtacctaaagcagtactatctgtttgtcctgctaaaataagttgcggtacgttatccattttggcgtcatacataccattaagtaaatgtacaacacctggaccaccaatacttaatgcgacaccaattttacctgttagtttagtgtaacttgcagcagctaaacttccgacttcttcatgacgcacatgtacaaactcaatattatctctttccgttcttaaactatcaactactgcatctattgagtcacctggaatacccataatatgatcaatatcccatgctttgtatgcttttactaatgcttcatttgctttaatcttgcccattattaaaaactcccttcatttttaaatcgacttcaatcgaatttttaaagctaattttaagatagatgtggaacagtaagctgattttctaatatcttttttaaataaaggagtagttctttaaaatatttacattaatttcatttaactccagctcactgataccaaatcattacttaaatgtacaaattgattataacgcatacctatttagtataaaaatagtatgagtataggtaaaacaattgaacttagaactgctgttaaaatcataccaattgaactataagcaccagtttctgaatcaatatcaagtgcttgagcagtaccaaaggcatgtgatgcgttaccataagtcattcctttagcaattgaagatctaaatcttcctaatcttaataaataagcgcctaaaatgctaccaatcaaacctgtcgttataataaacataaccgtaattgtatcaatgccacctagttgatgtgacacttcaatacctactgcagccgttattgatcttggtaacatcgttacaatagtttctttagaatagccaaataattttaatatactaaatacaaatacaaaatttaacatgaccgccatcaatacactactaaaaataacacgcgcatactttaaaattttatgacggttttgataaagtgggaaagctaaacaaaccaccgtacaattcaataaataattaatccattttccaccgagcatgtaagtcttgtaatctactctaaataataatagaacaataataataccaatagatgctataagtgcaggattcaaaaatggagtttgaaatttttgttgtagctttttcgcgccaatatacattgctattgttaaaataatcattattatcgcttctaaaatcaacatctaattaactccattcccgtcttgtttatttttaaccattttttcagctataaagcctgaaattaaagctacgcaacatgtaccaagaagaatcattgagaagaataaaatgaaattcaaattaatcattggtacaacatccatgattcctactactgaaggtacaaagaaaaataccattgtcgttaggaaaaaatttgacccttcatttacccattttgctggaattactttaaattgtaataataagaaaaataataataatcctacgatactgcctgcaatgggtatatgcatataacgttgaattacattacctaaataagtaatccccataatcactaatacttgaatcaacactgttattatctttttaaattgttgcaatagcatcattccttaattgcatttttttctacttgctttcctgattacaattactagtatagaatgattattcttataataaaaatattgaatttttatatgacctattatgattatgaatgaaagcggtttgattaatcatttcagataataaatcctcttattctaatgaattacgcataaaaaccgaaaagaaatcttatttaatgtaagatttcttctcggcttttattaagtgtatatatgtttatctttataatctttctttcataaaatcaatccactgtttcgttgcatgacttaggtacttatcttttttccaaatcacacctaattcccaacgcatacctggatcttctaatgttttgttactaaaactactatctaataaatgtacaatattttcgggtaatatgctgactcctaaatgggtgttcaataagttttcgataaaattccactgtgaaattttagaaatcgtattaggaataaagccggcatttttcgccgcttcaataattttgtcgttcaaataaaaatcttcattaaataaaatgaagtcttcatcttttaacatactcatatcaacatgcgcttcattcgctaaatgatgttctttatttaatactaattttaaatcttcttgatataacgtcacagaatgaaaaatggactgatcaaccggtaatgttgtgatgcctatatcgatttcatcattaattaattgtgtttctatcattttcccgccattttcgacaagactataggtaacattaggatatttttgatgaaattcacctaaaatattaataaattggttcatgttcatcactgcagacaaacctatactgatatgcccggtttccaatcctaaaaggctattgatttctttcggcacatcattatataacgttaagatttccttacattttttataaaaaatcgaacccgcatcggttaagacaagttgtcgcttactgcgatcaaacaatgtcatatctaattcttgttctaaatctttaatcgctttacttattgtcggttgagcgataaataaatgttttgaagcattcgtcatacctttttggtcaacaacttcaacaaaatatttcatatgtttaatgtccatgtattcactcctttgcatatatttatttaatattattcagtatacgttgaaatttcaataattcaataatatcgtaggactgaaaccaaatttactattaggcttacatctcactttagacatttcaactaaaaaatgaatacagaacatatattcaatacatttcataaactatcataacacgtacaaaataaaattattttcttttatttattaaattcgtttcagttttaagcattattcgcatcatttgtttgtgttaatttatttggttgattagttatttcattatcttgattgctaagtttaacaattttaaatccaatataaccaaatattattgagatgatagggactgtataatttaatatcgcatagggagcatattctattactgaaacacctaaggtagatgcaataaatacgccgcatgtattccaaggtacaaatacagaacttaatgtaccgccatcttccagtgctctcgaaaggtttttaggatgcaattccttctccttaaaggcattaatatacatgcgagaaggtacgatgattgatatgtattgctctgaacaagtaatatttgtgccgatacatgatacgatgaccgatgctattaatgtacctgtagactttgcaattttaagtatctgagtgattaaagcctttagcatacctgagtactctaatacgccaccaaacgtcatcgctactaatgttaaagaaattgtgtagaacatagattctaatccaccacggttgaataattcatctacaagtttattacctgaatcaatcgtataccctgtttgtagcgcggttaatgcttctgtaatcgtaccaccttgtacaaagatttgtgcaaaaaatccaagaacaatccccatacagatggctggaatctccggtacttttaatacaactagagctatgacgattaaaggaattaataataaccatggcgtaattaaaaagtgattttgcatggtgtctagaatggcattaatgttttttgtatcaaagtttttcgtcccaaaacggtgaccaataataaagaatgcaaccagtgaaatgattaaagctggaatcgttgtatagaacatatgtttaatgtgctcaaataaatcaacgcctgttaagccagaagccaagttcgtggtatcagaaagcgggctcattttatcaccaaaatatgcaccacaaatgaccgcaccagcaaccataccagctgaaatccccatactgattccaatgcccattgatgctactctcaccgttgccatcgttgaccaactactgccaatcgctaatgcaacaataccgcacaaaataacaactacaaccaagaaatatcttggatctatcaattgcaacccataataaatcatagtcgcaaccacaccactaccaatccatgagccgattactaaaccaactaatataatgatgacaatcgctggtaaagcatgtcttatgcccttatacatcatttcttctacttcactgaattcataaccatgtattaaggtaactaaaatagccactgctgtaccaattaataaatgatagttggacaattaatgatattgatttgtgatattgacttttaaatatgcacttattcagatgtcatattacaattgtgtggcatatatttcttccttgttaaagttatttgtaataattgtttatattattgtactttttacttctcaaccttattataaaaatataattttaaaaatgactggagatatgtatgaatattaaaaagaaattagtaaatgtatttattgcaactacgctattaatgacagggacagtcacttttcaagcgattaatgaatcacaaactacaaatgctgctgttaactattactataaaaaccaatgtacttggtatgtatttaaaaaacgtgcgagtgtcggtaaagttgtaccaaatggttggggtaatgcaaagtactggtacagtaaagctaaaaaagccggatatcgtgtaggaaaaaaaccagcaaaacgtgctgtcatgcaatctactagtggcacatacggtcatgtagcatatgtagaaaccgtttataataatggtagtattaaagtctctgaatataattacaatcgacctttagcctatggaacaagagtgttaagcaaatcctctgcagcgaagtacaattacatttattagtttctatttagactaaatagatgcaaatcataattgccatagaaatctttctagattagccagcgttttatataactgttacaaacacgccatagatgacgtcttgctgtttaattcaagccaaaacgcatacctaaaaaagtggcggctcaatgttttcagtcatctgctgccaaataagaataagcgtccgagacatctattcatgtctcggacgcttattttatatattaatgaaattgataactttgatgacctttagcaaatgctttaacagtgtatatccatgatcccccatcattttcgatgtcatttgcacaaatgatgagttggtctgtacctggtataaacgctggatgtgtcgatcttaacatgtgaccttgatcgcgccctggcattaatatctgaccaataggcgaaccttttttattaaaaacgagaacttttccttgaccatacatggcaacatacaaattatcatcgctatcaatacagcacgagtctggaccctcatgacctgtaaaataatatggaatggaagcaccaaatggcgcaattgtcaccccatcctctaataaatcgatacggtgtaaacgattggcattcgtttctgttacccacaatgttttttcatctgtgcttaaagctacaccgttagcaactgcaagattttgtatgactggtgtaattgatttaaaatctggcgatacataataaacgccacctttgagattagtagaataaccacggaaatcagtaaaataaaacccacctttactatcaaagacaagatcatcaatacagtattcagttccaatatctgaaacgatatcttgcgcgtcattaccgtcagcatctaccatgaagattcctccagtgctctcaaaatcccctaaatagcagacaaatagtctgccatctttatgaattttgacggctgctgggttttgtttatgcgatttaaatagttcagtgacttttttatctggtaaattcacatgaaaaatcgtaccaccaaacacttcacaaagtaataagttaccttgtctatcaaagcataatccttctaactgtaatccttgtttagatatttctagccaaggctcggcagtgactgtaggtaattgttgctcatatgcaggtattggtgcgacactattttctccatctttataagctagtactggcaattcatttgaatccataaagctccaccccttttttaattactcatcttcttaattatatgcaaagcctttcataaaataaaataatttcatttcctgaatcgtgcgtatatatctaacgcttataataaaaaccccttttaatgagaaattaaaaagggttaaataattaataaatgactctattataatcattcgtattgtacttattgtttttgtaatcttaattcgtctaataattgttgggcaacaactgtattcgctcttggttgtgtttttaacatatccgcaatttgtgctatttcctcaccttgcgcaccaacaacgattgctaaagatttatattgtaagctcatatgtccttgttgaataccctcagatacaagcgcacgacaagctgcaaagttttgtgctaaaccaactgccgcaacaacatgaccaagttcttgcgcagaatctactttcattaaatccagagatgcttttgcaataggtaacactttcgtgcctccacctaccgttgcaagtgtcattggtacttcaattgttcccactaaagtttgtctttcttcatcatatttccatgttgctaaaccacgatattgaccatctttacttgcataagcatgcgctgtagcttctgcacctctagtatcattgcctgttgcgagtacaactgcatgtatgccattcatgacacctttattatgtgtagctgcacgatggatatcaacttgagctaatacagaagcccgttccattcgcttagcaactgcttcgccatctcgatcacctttagataacgcatcaactgtaatttcaccttgtacctttactacagaagctgtggcatgattcgacaagatactcattaatatatcaacgtcttttaattcatttttaagatacgctgttataccttctaatatggtatttaacatattcgcacccattgcatctttggtatctacggatacttttaatgataataacccttcatttggaaaagtatcaatatctattttacgatagccgccacctctttctataatagaaggatacacttcatccgcaatttgtttaatttgcgtttcgagattatatatctgttgtgatagtatctcagtatcggatactccatcaaaaacgatttgaccaatcattagacgttcactagaaataactttaaatccacctgtctgattgacaagttttgcaccgtaacttgccgctgctactacagatggttcttcaaccatcatcggtaccacgtaagatttatcatctactataatttctggcaataaaccgacaggtaatgttccttgtccaatgacattttcaattaaactattcgcaatttcttcaggaattaaaggattatttaacaaagtatttttattttcttcatttaaccaacctttttgaactaacgtgtttaacttgtcttctcttgataaatgacgaaatgatttgtctaatgcttccattattaaacctctctttctatagcaatagcgatacctaaaccgccaccaatacaagcagtagcaatgcctgtttgtttatcttcttgtgttaaaatatttacaagtgttgtaactaaacgtgtaccacttgcacctatagggtgtcccaaggcaatcgctccaccatataaattgagttgttcttcagctatacctagatttttacttactggtatactctgcgccgcaaaagcttctgtcatttcaaccacatcaaagtcttctatcgctttatcagcttggtttaataattttgtaactgcatgatatggtgcataacccattaactctggatcacagcctatttctgcatgtgctccaacaaatgctaatatttcaaaaccattttctttggcataaacttcatccatcaagataattgttgatgccccatcattaatgcttgaagcattgccacctgtcacagtaccgtcttctttaaagattgtttttagtgtacttaatttttcaacactactattgccacgaataccttcatctgtggtcatccagtctccgtttacatcttctaaaggtacaatttcattttcaaatttcttagcttgtgtggcttgatgtgctttcagttgtgattcattagcaaacgcatcttgcgcttcacgtgtcacatcatatttttcagcaattttttccgctgtaatacccataggtacattcataaaggcatcagtaagaccatcatgcataaagctatcaacaggtgtttcactgtcatttaaaatgagttgaggcgcattcgtcatactttcaacaccgccaactgctacgactttggcttcacctaattgtattaattgttttcctaaaataatggatttcaatcctgaaccacagacttcatttattgtcatagctggtgttgtattaggcacgccagcattaatagcgatttgacgtgctggattttgtccattgccagcttgtagtacattaccatatatgacttgctcaatattttgtgaatctaaatttatagcttttatagcagcttccaatgttttagtgccaagttctactgctgaataatgacttaactttcctttaaatctccctatcggtgtacgcttagcacttacaattgcgattttattcatgttcattctcctttatatctctttttcaaatcattgtattttattgtcacgatttggtatgatacaattgcttatttatatatagaaaggtgtcgatacgctttatgacagttggtattgatcaaattaatttttatgttccaagattttatgtagacatggctaagcttgccgaatcccgtcaagtagacccaaacaaatatttattaggtattggccaaactgaaatgtcagtaagtccaatgagccaagacatcgtttcaatgggtgcaaatgctgccaaagcgattgttacagatgaagataaaaaacaaattagtatggttattgttgcaactgaatctgccattgattcagctaaagcatctgcagtacaaatacataacttgctaggcattcaaccatttgctcgttgtattgaaatgaaagaagcttgctatgcagctacacctgccattcaattagctaaagattatttagcacaacgtccagatgaaaaagtgcttgttatcgctagtgatacagcgcgttatggtttacattctggcggcgaaccaacacaaggtgctggtgcagtagctatgatgatttcacaaaatccacgcattcttgaactaaatgacgatgccgttgcatttacagaagatgtctatgatttttggcgtccaagcggacaagcttatccacttgtagatggtgctttatctaaagatgcttatattcgttcattccaagaaagttggcaagaatatgcacgtcgccacaacaaatcattagctgattttaaatctttatgtttccatgtaccatttactaaaatgggcaaaaaagcacttgattctattttaacagatgacattgatgctgaaacaaaagaacgtttaacttcaggttacgatgcagccacttattataatcgttatgtaggtaatatttatactggctcactttacttgagtttgatttctttacttgaaacacatgatttatctgcaaacgatacgattggcctatttagttatggttcaggatctgttggcgaattcttcagtggtaaaatcgtagaaggctaccaagatgtacttgatattcaaggacataaagatttattaaataaccgcgaagaaatttcagtcgaaacttatgaatcattctttaaccgtttcgacaatttagaatttgatcatgaaactgagttagaaaatgaaaaaaatactatcttctaccttgaaagtattaatgatcatatccgtaattataataccttaaattagattttaaatcactaaatcttatcacctacgaacgacatcctttaaattgtcttatttattgtatacattttaatcaaatgtccgttgttcgttataaattcaagttcaaaattattaattaataatgagcgctttcatactccagtttcactgatgtaatgaaaagcgctttttatattcaataaaaaaatccacctcaaaaattgtttaaattctttgaggcggatataggtttaaccgtaataacaacaaatgttattcgtatctttttctattttcttcttcaatcaattttgtatatgtttcacttcgtttttcatttatttttaatgttaatcccaaggcttttctctcactattagcatccttatacaaagaaaccatcattagaaaaacaacaacactaaatggaagtgctgaaataatggcagctgattgtaaagcgcttagtccagtatctccacctgctaacaataatacataggcaatagctgctaaagccaaaccccaaacaatttttataaaacctgaaggatttaatgttccatatgcagtttgcattcccagtacatatgtcgcagagtcggcagaggtaataaagaaagaagctatcaacgctaatgctacaattgataatataaatccaaatggcaattcattaaagatgccaaacagttgcgtttctggtggcatttttaaaatgcttgaatgcgattggcccactgtaatacctgtagcaccaaaagcactaaaccaaataatacttataacaactggaacacccaagactgcaatgatgaattctctaatacttctccctttggagattctagcaatgaacgtaccaacaaacggactccagctcatccaccaaccccaataataaatagtccaagattgaagccactcacttttctgttcgttcagcggcgctacgtctaaactattaaatacaagtgagtttaaataatcacctgtaccactcgtcatcatgttgaggataagtaatgttggaccaacgacaaatatgacaattaacaatatcgctgctagaaccatattcaaattacttaagtactgtatgcctttacttaatccactccatgcgctgtataaaaacaatacggtaacgattgcaataataataccttgtacaactgaattacttggtacaccaaataaataatgcaagccaccattaatttgaatcgcaccgacacctaaagaaacagcaacaccaatcactgttgcaaatacagcgagtatatcaacgatgttaccaattggcccatctactttatcatctaatataggtctcaatgttcttgaaataagaccattttcacctttacgaaactgagaataagcaagacctaaggcaacaataccgtatactgcccatggatgaaatccatagtcaataaatgacgacttaaaagcttcagccatagccgcttttgtttctggatctgctgttggcggtgccatatagtgggatattggctcagaagcaccgtaaaatactaaaccgatacccataccagcactaaatagcatagcaagccaagaaactgttttaaattctggtttatcttttggttttcctaactttaactttcctattggactgaataataagaaaatacaaaatcctaatatagcagtataaagtagcatatagtaccaaccaaacgtctcagagacccatgttgatatattgccactaactgttccgaattgttgtggaaaaattgcacccacaatcactagcaagccaattactgctgtagaatataaaaatacacttgaaaatccctttttttcctttaacagaacactcaccatccctaaataattaaataaagacggttatcacgatatcatactgagctaattaatcaactctatttagaaaaactttacaatcagtaaatagaaagtgcaaagctcaatacatgtgggtgttccttagactgcatcaaggtttcgtactgtgcttgggtctataaaatacattcatgtctagaccctctaattttaacaattctattttggtatctatgccaccaccataaccagtcaagcttccatcttttcctacaactctgtgacaaggaatgataatagaaatcggattactaccaactgcaccaccaacagcttgagatgacatcttagcttcacctcttttctcagcaattttttgagcaatttctccataggtccatgtttcaccctgtggtatttccaaaagtatttgccatacttgttccctaaatgatgttccagttgcttttaaaggaaaatctattttaggattatttcctgagaaatacgcatccaaccaacgttttgctttatcaaaaattggcaaatcagctgtcattaattcatctttatactgtgtttcaaagtctttatgattaggtaaccataaacccgttatattttccccatctgaagtgagtgcgatttgaccaattggcgattgataattacttttataatgcatggtatcccctcttttccttactcatttattggttataatcttaatgctttcatcatttcgtgtaaactcgtaagatgatatattaaaatattttcattacttactaaaggaggactgtacatgtctaaattcaaacaatcatctaaacacttaaatttaagtttccatcaaatccaagcatctgaccgcataacagccatttacaaagcactttaccaattcaatgatgtcgtactcggcttagtttttctaattggtagtattctattttttaatagttcaactgtaacaaatggtacgatattatttgttattggtagtattcaaatgactataagaccattaattgccttcgtacatgatttacatcttgcttttaaacgaaagcaataatgaatcttgttaaaggatttcctaagttaaaacacaattccaagataaacctggccaaaccatctaattatgcagcgaccagtttttttatttttattatccttctgtcacttgccccttttcgccttgtctcacttttcgcgttggaataaccagtgcacttgcacatacgccgcctataaccaaacatgttccaactacaaacccaatactagcagctgtatcaactgtttgtccgctttgtgaaactccagtaaatatggacgtcataatcgctataccaaaggctccaccaagcgttgagctcattttaaaaataccagatgctaccccaactttttctgcaggagttgttgaaactgcggtgcttaaagccggtctagcaaacaagccagtacctccaccaaagaaaaccgcagcaattaatgcgactactacataaattgaagtattaaagaaagttaaactaaataacaatatacctgtcgctgtaaaaataggtccaacaaccattgcgcgttttgcaccaaagcgcttgatacttttttctcctaatcgaactacaagtaacaatgtaattaaatagggtagcgttaacaaaccagcttgaaaagcactgaatttcaagccaccttgtgcatatatattaaataaagcaataacgcctacaccagtattcaacaaaaagttagcaatgactgcaccaataaaaggtttgtttttaaataactccaaatcaataaacggtgattgctttgctttttctactttataaaaaataaaaatacagataataaatacggcactcaatattagcgttgctgaacttaaccatcctaatttatatccttgtgtaattacaaactgatactagcaatcataattacaaagatagttagaccaatataatcaaaatggttagattgtgctttgacttgtttgctttctggcaggttttttaccaacagcaatgcaaccaaggacaaaagtatagagagtacaaagatggattgccacgatataaacgtagccattgcacctgcaaagaatgatgataggccggtccctccaaatgcacctatagaccaaaaacttaatgctttttgtctatcatccccttcaaagaaatcattaacgatagaaatggttgctggcataataatcgctgctgaaaaaccttgtacaattcttcccaagagcaacaaagtgacattaccagaaataataagcatcaatgatccaataatactcaaaattagagcaatacgcgtcatcttaaccttcccaattctatctgaaatgttacctgctacaaccataaagacgccagtaacaaatgatgtcaaacttactgaaatgttaacaatatctggacttgctccaaaagttgcctgtatcttaggtccaatatttaaaaaagattgtgcaaatagtcaataagttaaaatagataagacaattcctaccaataacttattgtctgaaattttagtagtaccttctgtcataaaaaaacatcccctatgtttaaactaatacgaaaattcagcttaatatttttaaaatcatatatccaactcactgcccaaaacgttattttacacattatggctaagagcggtatcggtatatttaaaaatgatttacactttgaattttagcattttttaacataaaaaggatgaattcacttattttttgcgaattttctgacaataatcgtatttcttttatctgtcgctacttaaaataatttattgattgctctattaaaatatttcttaaaataatattggcggtgcagcccttttctatttgtatcaaaataaaatacggatgtctctgatactagcagttcattcaaaatatctactgctgcctctgtttgtggcaccatatattggtttaagtgattactttgtttcccttcaagttggccgacataccagtaaatatgatgtgttgaattaataatcggttgggatttcataaacttaacaaagtcagggtaccaaactgaaggtgaaattaatatataatgcccaaacgtatctgcgtgtttaaacaacgcatatagcgatacgagcccaccanatgaggcacctgcaataccgatgtcttttctatcctgagaaatacggaaacattttcttaaatacggtattaccgcatcagccacccaagtgatgtacgcatccgcttaccccccatattcatatcaccaacaacacttttccagggtgtataatactttttttcgattattaggcacgataccaacaaatataacgtctttttttacatctttaaataagtagtctccatcttgaactataactaaaggataagacttaccgtttgtcttaaaataattcttcggtaatttaatttttatttcttggtgatgaaaagatagactgagttctcttatactcataacaatcacctctttctataaccaacttaaaacgaactgtttttataagaaattataaaggttaatatcgttttctttagcatactctaaagctaatatttccaatatattaatcattgatggattgcctttaactttaataaattgaaattttaatccataattttcagctttaatttcttttgtttcagcttcatctaagctattttgttcggcaaatactcttctgaatcttgcagtaccagagtctgatttcacattaaattggcctaatttatcgtttaaatctttttgtgttattttataacccgtcatataaccgcctacttggcccacaaagataggttgcttattattaaaaataacaaaaatccctttttgaccttcaaccttacttctgctgtctttatcaaaagcacgtgcctttgatttatcatatttaaaaagcttttttagtggttttttataattatcaagcagttcacttatttttttgtcaccgttcattttaatcatcctttatcattttattatcactctttatatacactatatcgtattttcataaacttacggtaacatatatgttttttgattaattttatacaatacaaatagaaacagaatgatgataagctactttatatagctatctcattctgtttctatgtttacaataaaaataaatgaactttatcaaaatgaatactagaaaatatctctattcctcataaggtacaaatgttttcaatcattgggcttatattttattttaaataattcatgactgtaacacctacagcctctgctgagacacgtaaggctttttcactgatattgaatttaggatggtgatgtggatagatgttaccatcttctggagcagcacccgcatatataaacgtactaggcaacgcttttgcataatacgcaaaatcttctgatggtggctgagcttcacatctttctactttttgaatggcatccgtatcagcactttgaattgagtcgaccacaaattgcgtaaactctggatcattgtacaacgctggataatcgtcatgataatctaattcacatgttacaccaaacgtagcttctaaaccttctgttaaacgttgtatttctttcttaatcgtatgttttgtgtcatctgtcagtgcgcgaacgtctccttctatttcgatactgtctttaataacattaaattgtcctttaccatcaaatgagccgatagtaacaacacctgtttcaaatggatttaatcttcttgaaacaattgtttgaactgcattgacgaaatatgcgccagcaacaatactatcattggctgtatgtggtgaggagccatgtccaccttggccattcactttcaatttaaagaaatccctaccagtttgaacatacccttcacgataataaatattacctgctggcatttgactcataacatgtacgcctaatacatgatcaacgccatttaatacaccatcttgaatcattgcttgtgcaccaccaggtggtacttcttcggctggttggtgaatgatgactactttccctttgaattgtgattttaattcaattaacgtttctgcaagtatgagcatatatgctgtatgcgcatcatgaccacatgcatgcatgacaccatcatttttagatgaaaaagataaacctgtatcttcttggattggtaaagcatcaaaatctgcacgaattgcaattgttttacccggttttccactatcaatcgttactttcaaaccatttggtccaacatttgtctcaacttcacagtctttatctttataaaatgcttcaatatatttaggtgtttcttcttcgtgaaatgatagttctggatgctcatgtaaatatctacgtatttcaatcatacgtgactctttgttttttaatatatctattaattgtttaaccattattattcctcctaataatcctttgtttaataacatgatacactttctagtttctctgtatgtgttaaaacatttataattgttttattttaacacttagcttttgttttagtagctggcaccataaacatgataatgattaaagataatagtgccataatgacatttaaccaaagacctgcgaatgcaccaatttgaacatttgttgcacttgctataacaccaaaaagtgcgcctgataatgcaataccaaatgcaccaccaagtgatgatgccattttatatatacctgaggcaacgcccactttatcttctggagaattagaaattgccatatctgtagacggtgtcgcatagaatcctaagcctaaaccatataataaataaccaataatacaaactactacataaataacactaggtaagaatgtcagcgatatgagcataatacctaccatattaaaaagtgtccctaatagcatcggctttttagcgcccaccttttgcaatactttctcacctacacggatcattaataacacagttattaagtaagtaatggataacagtcctgtttgaaatgcattaaatcctagtccttgttgtacaaatgtattagcaactaaaagtgcacctgcaacaccattcaataagaaattagataatgtggcacctgtatatgctttattattaaataatttaaaatcaattaatggattacccaccctgttttcaacttttaagaatatgattgttgctactataaatataataataagacctaaaatcaatggcgacgtgataccgaatgttccactttgcgttataacaacgttaatactcaacatcataatcacaaataatatcagtccactataatcaaaacgttgcttcagtgtgctttctgattttgtttcgggtgttcctttgattaaatacattgctaataatgcaatgataatagataaaatatatatccagcgccatcccacaaaagtagcaaccatacctccaaataatgatgctagtcctgaacctccccaagatcctatagaccagtaacttaacgcacgttgtctctcttttccttcaaaataagttttcataattgctaatgttgatggcataatagcagccgcagacaatccttgaataacccttccaacaattaataatagtggtaaattactgataatgattaataatgatccaataatactgagccataaaccaatataagtaattcttacgcgtcccactttatcagcaagactccccgcacctacaacaaacatacctgaaaataaagctgtaatactaactgcaatgctaattgttccaatattactatcaaaagattgctgtaacgttgggaccacattaagtaaagattgtgcaaataaccaaaacgtaacaacgcctaacacaatacctaatatgagtttattatcccctttataattttgtgtatttccctgttgtgtcattatacttcctcctctatccaatttaactaatgaccattagggaagataagctttcattgtaaatgcccttcatagcaacattttcaactctattaattcgctatcctctctgtctcaagtgtagtgattatcaattaatagcaatatatattatttgctattttaactacctatttattgcatatgtattatttcttcgactaacaacaaaaatagatgtatcatttttgtctttttaacaacatacctttcaaattttgataaatagaaagaggctattacaacaaaaggtgcctccccttcgttgtaatagccaattcaacatagatattttttaaactctataatttggatagcattcgttaacaatttcaagtgatatgtgattgtatcattgactttcacttcactaatgtccattttcggatatgagatgcgattaacataagcaatggtttcttcatccataccatatcgcgtattataatgttgccaaactgtatataatgccccgttatttttatctaaggtcatatgcttaattttgtatgttccaggatgtgcattgatgatattaatctgatattccttatgatttaaatattgtgcatgatgattcaatatataatatggattataatgttcagcatcccacatgacaatttgaaaatggtcagtcgatccaacaaccatacaattttcactttgatataacacttgatcgaacagttttctataaaaggcacttgtaaaaaaggccggcctttttccatcaaattgatgatataactcaataccagtgagttgtgcacttgaatcttttaatttaaattgttcatgcagctcataattcagccaataaccgatcatttgaattctgtcattcatttcaattaactgttcaaatatgatacccgctctaaaatactctccattcgttaaatgtgtatctccagtcaacgtattccaatttaataatataaacgagatagaactttgctgaagctctaatgtttcaacaaccttattaaattgttcgtaaatatgtcgtttcgctaattcatattgctgactttctatagattgaaaatcaatcatatcattctgattggctgaaaaagcaatgcgatcaacaattctgtctgatcgttctaaaattcgtttcgctttatgaggcgcttctaatttccctatgtccacattgagcacaatttccacatttgtaaaataatatttaaaaagagcaaccagctgattaaatattgaatcttgcttacaatcaatataaactacaaatttcaataaattattatttggtaagccattaaaaatatgttctaaaaggtaagtcaattcttgataatattgggtgaaattaatcgtacttctaggtggcgtaagttcgatgcctaaaccaatttgatgttttattaaaaaattaattgattcatccacttgcatataaggatgtatattgggaatcatttcatcactctcaatttccgaatgattaatacgtccctgttgaatgggatctttgataagtatatggtctaatcctaacatggtcttcacttcaattaactgtcttctaacgcgatgtgtcaggattgtttcgagataaccaacttgaataacgtgttgatagtgggaaatggatttcccatcattttgtaatgtgatatcaattactttttgtgcatcgggtgattgaacaatatctccaatattttgatcaatcaataaagataaataatataaataagattgatacgttgttgtggtaggacaatcatctacttttatatgttgttctttcatttgaaatttaagtcggtagttcgatggcgtgtatgttgtttcagctttaaagtactttaataatgcgttagagttactaaagccatttttataggcgatttgtgtaatgggttcattcgtgtaaattaaatcatttttacactgttcaaggcgcacatgattcacatattgattaaatccaacgccctttttttgcttaaacaatttagataaataagcatcgctaagtccaaccatgtctgccatctcagtgagtttaatcgattcagtataatgtttatcaatatattcgcaaatatatgctaacctgtcatcagctaccaatggcatttgtgcttgtatattggtagttggtaaataccgcatcatgataaatactaaatctatgagttgttgttcgatatataaacggtagaattcaccttttctaatatagacaatgcctattttagcaactgcattcacaatttgttggtaaatgacttcttgcaaagtatttttatttaaaataaatgctttatctttataatcattcatatactgttttaagtatgattccgttaaatgaattgaaagatataatgtatttttatgagttgaaaatcgacatgacgctctatgattaatcagaaatacttcgcctttttgatagtttgtcacagagtctccattaatcactttcatcataccgtttagtacgagcacaatgcgtaacccttcttctaaatctgtaaggttattaaaatttttattaaattccacattatatagttctctcatgttgcacctcttattaaattatacttcgtgtacaaggactaattaatactttcattttagcaagattagcaaatttttgacagcgacgcttacgctatcacgaaacaatttggtatataaaaaaacgtaggtatcacagcctaatggctatgtacctacgcttaattcaacaatagaatctattattttttaacaagtttttctatcaatgcatttaattcactgatattgtcactttgttttgataagagtgacatcaatgctttatcttgtagctctgaatcttcatttaatttaaaagttgcttcatgacgtttatcagcatcattatctgccttaccttgataagcttttaatgcttcatataagaaatgttgattcgtagactgttgagcaatttgatcatataaagctttagtttgtgcgtcagtagtaatcacatttttgttgtcacggttatcatttgaagttgcaatactaaatgaacgatcatactgttctttcgatgcattttgattttgtttcgcttctggttttgaaggcattttatcttgtaatgcatgtccttcaatatcaacatgcggtaagattctatttaaccaaccaggaatgtaccaagatgctttaccaaacaattgtgttaatgctggtattaataataaacgtacgacaaatgcatcaaataatacaccaaatccaagtgcaatacccatggatttaatcatcacgtcatcttggaatacaaaggcgataaacacactgaacataattaatgcggcagcgacaacaactgggccactttctttaataccaactttaattgagtgttcattattgcgtgtcttactgtattcttcatggatacgtgacattaagaacacttcatagtccattgctaaaccaaataacagacctatagttataacaggtaagaatgcaagtaatggtccagtcgtatccacaccgaataagccagacataaatccttcttgcataattaaagttgtaaagcctagtgttgcgactaatgaaagtacaaagcctaataccgctttaagtggaataataattgaacggaatacaatcattaacaagataaacgctaatgctacgataacacctgcaaataacggaatcgcttcatttaatttttgagacatgtctatattgatgacactttgtcctgacacttctgtcttgaagccatatttatctttagcatcatcattataatctcttaaatcatgaactaaatcatttgtagattctgcgttaggtcctttttctggaattaccgcaattaaggcataatctttgtttttactcaattgtggtggtgtcaccatatcaacattatcttttttatcgatatctttcgtcatatcttgtaaatctttttgtaatgcttgtgggttatcattcttatctttaacattcacaagcatggcaatttgaccgttatagccttcgccaaatttatcggatacaatatcatacgctttcttctgcgtactatctgctggtttcataccatcatctggaatacccaatctcatattactaattggtattgcagctacgactaatataataagtcctataagtacagcagctaatggtttaccaacgacaaatttagaccattttgtgtctacatcattgtcaaattctgattttgtttttttcggtttgatttgtttatggaaaatactgattaaagctggtaacaatgtcaacgcactaataaccgctacaagcacactgattgcggaggcataacccatgatagctaggaaatcaatgccaactaacgataaaccacaaacagctataattacagttaccccagcaaagataacggcacttcctgcagtacctactgctaaaccaactgctttaatatgattcgattccgtcttaacaatctgacggtatctaaataatataaataaagcgtaatctatacctacggctaagccaatcattaccgctaatgttagtgttacattagggatatcgaaagcatatgtaagtaacgaaataatacctacacctgtacctaagccaagtaatgcactaataattggcataccagccgcaataaatgaaccaaatgtaatgagaagcacaacaaacgctacaataattccgattaattcagaagaaccgccaatttctgtgttttccatacctgtacccatcaattcaacttggacattatggtcatcttctaatttatcgactttatcttgcacattatccttgccatcttgtgtcatagacgtcgcagagatatcataattaatatctgcaaaagctgtcgttttatctttacttatttgtctgttttcgtatggatcggtaatgtttttaatatctttgtcatcatctttgatgtctttcaatgtatccttgatatcttttgtcatatcttgtttaacgatgccattatcggaatcgcttttaaatacaacccttatttgagccttctcactgtcttgattaaattcatcttcaattttttcattagtatcaagtgattgcaaaccattcattgtgatatcgttatcaaatttaggtgcacttactgtaagcgggataataattgcagcaagtataataacccacgcaacgacactccaccatttatgtttggccacaaatgatcctaacttgtataaaaactttgccaatctattgcctcctcagataatcaacgttatagtttaattgtatagtgtagattatttatattaacacaataaacgctgtgtacaattaataaaagaattaaaaactgtaatatgcctatttaaactacagattaggagaaatgtagaatgaatgaaaaagatttacgagtcattaaaaccaaacgcgctttatccacaagcctatatgtcttgcttgagaaacatgcattttcaaacatcacggtaaaccaaatttgtaatgaagcactcacacatcgaacgacattctataaacacttctatgataaatacgatttgcttatttatttaattacagaaatcacaaaaaattatttctctatggatattaaagatcgtatcaataatccctttagtgttatggaaagaactttaaatgatattaacgagttgaaacgtgttggtgataaacaatgcgatgataaagaattcgagcgtacgatcagtaattatttcatcaaaatattgcaaaatgatattaaagaaaatgaacatcgcatttcagtagacgcaagcgttccaacagaattgatattttatgtttatggaacgagtttatatggttttatggaatggatacgagataatgatattcaacttagcgcacatgaaatcgacgtactcttccaaaaattaatcaatatcaaggttgaagatgtttaatcattgttgaagtattttatatggtatgtcatttccataatcttaattataatgccctttttcaatgacattaaaacttattacactacaaaaaggcgacgccatttgactggcatcgcctttttcaatttaaagatcgtgttatattgctatgctttttataaaccactttatgcgatttaaaacatttctgaaactactttttgttctaagaagtttaataagtagtctggacttcctgttttagcatctgtacctgacattttgaaaccaccgaatgggtgatatccaacaactgcagatgtacaaccacggttcagatataagttaccaacatcgtatgattcaacggcttctatccagttttcgcgattatttgtgatcacagcacctgttaaaccataatctgtatcattcgcaatttctaataattcttcaaagtctttacctttaacaaaacctacaaccggtccaaagatttcttcttgcataatttggtcgctcgatttaaggtttgctataatagtaggctctacaaagtatccagtagcatcatctgtaccgccaccttgttttaacttgccttctttactaccaatttcaatataatttttaattttatcaaattgtttttgattaataactggtcccatatacgtgttattttccgtattgcctacagttaagtttttagttaatgcaacagctttttctaaaacttcatcatatacatctttgtgtacaatggcacgtgaacaagctgaacatttttgaccagagaaaccaaaagcagacgatacgattgattctgcagctaaatctgtatcaatgtctttatccactacaatagcatctttaccgcccatttcagcaatcacgcgttttaagaattgctgtccgtcttgtactttggctgctctctcaaaaattctagtacctgttgcacgagaacctgtaaatgtaacgaaatgcgtgtgtacactatcaacaagataatcgccaatttctttaggatcacctggtacaaaattcacaacaccttttggtaatccagcttcttctaaaatttccattaatttatatgccgttaatggtgtatcttccgctggttttaaaagtactgtatttcctgcaactacaggtgctaatgttgttcctgccataattgcaaacgggaaattccatggtgggatggttacgcctgtaccgataggtttgtagaaatatttattatgttctccttctctatctaatactggtttaccatcagcaagttccatcattgatcttgcataatattcaatgaagtcaataccttctgcagcatcgccgaccgcttcatcccatggtttacctgcttcataaaccattactgctgagatttcttctttacgacgtctaataatagctgcaactctaattaaaaattcagcacggtctttgtgtgaccatcgtttccaagatttataagcttcattagctgcttcaaatgcgtcatccacatctttttgagttgcttttgaaacttctgcaatcacttcagttgtatttgcaggattgatagactgatacgtatcttttgtgaatttctcttctccattaataactaaaggaattttttgatttaattcacctttaactttctttaatgcttctttaaatgattcaacattcttactatctgtaaaatctatgcttggttcattgtgataattgactaccatttttctacccccatgtgagtttgtaaatagaaaactaaatggaatcttccattcttaatgtcattgtatatgtatcacacaataaatgcaatcgcttacataaactttcctaaaattgggtcgcttcgaatctatttccgttcattttgccacactttatattatattcgatatttttaattgtgtaatgtttatattttgtattttaaattaaatgaacaatcgagaggtaagctatatatgaaaacatatacgtcagttatattttggatgcgcacgatagcttgtttaagtattgttctcattcattctattacaactacatttagcaaaatggattttctaggtcatggaactgcaatcagagtatttcaattaatgcttatgttcagtaccccattatttgtattcatttcagaattcttattagctaaaaattatcacgtcaaaacaaaaccaggattttctaagaataaattaatttatttaggtatcccctatataatcattaacattggtattgcactattctattttgaatccaaaacattcgatcaattcatgacacatctgggagacacaatgttccatggtggtgcagtgacatatttcattgttattattttccaattctatatattacatatactttttgcaaaatatctcattaaatggaaacctgtcccagtgattattggtgccgttatctttgctacaatttattgggcatttagacaatatgcaccacagtcagaacatccaatccttggtctattctgggaaagagaaggctggatgctctttttaggatggattagttacttcttaattggcttttacactggtatctactatgaaactttcatgaagaagattaaaaaatatacttggccaattattattggcgcaataatagcaacatctatattagtcgataactatttgtttggcattagcacgtgggtagaatcaaaacgctttgatatacctttttatgtaaagatggttattctagtctttttcttattcgcttcatatgttaaatacgtaccaaaattcattttatttataagtaactattctttctgtatctacttaatacattacttcttcgtccacgaattaggtttgttaagagcagctagttcacttagaaatattgctttcaatttcattatcacgttaaccgtgtccatttgtttagcttatatattcaatttgtcaaaatatggtaagtttatcgttggtggtattggccatataaaatatgacaaagtatacgaaagttataaacacggtaaaatggactaagctgaaatgttaatatgcgttaatgcgcattttctactttcattcagtcatctacgctctaattggaaatagcctgagacatctatgtatgtctcaggctattttattccctattttttataacgtgctttcctacttaattgtgttggtgctttatcttgttcttctgatttatgatcatcctcttcatgatatgtagtttcagtattacgtttttgattgttatgatgatgctttgcttgttctttttttctatttcctttagctggttgatagcgatcataagatttttgtttttttcttactaataacaatatacctgctactaaccaaagtatagctgttatccaattgagtgtaagaactgtcacaagtcccagtaaaataaatataataccaacaaattttggaagtttatttgttaatattgcaaatataatggcaatcactgtacaaacaataacaacaattaaagctaaaataaatagattactcactaagtctactatattagctggatccatctgtgatgcattttgattataaatattactctggtttattccttctattaactcatttttcacactgacatcattaaaaaatggtgcaacgatggccattaaaaaaattaaaataaattgtagaataataccaatccatatgagtattttttcagcagtccttttcatatgtctcctcctaacatcatctatgttgttttcataccctgcttttcaataacttatgcactagtctgtatgccattcagtgacacgcgttcaagtaaattactttaaaagtatttaatccctatttgattacattttttgttaaaatagtaataatacatagttaaggggtggtttgattgaacatacaagatgcgcaacctagcactttaagagaaatgattaaacaagggaaactaactggtcacacaagcgggatggcaaaaggctatgtacaagctaacgtagtcatacttccatctaaatatgcttatgattttttactattctgttttagaaatcccaaaacatgtccactcttggacgtatctgaaaaaggaaataaatcatttacaaaatacggtgtaactgcagacattagcactgaagtagctgcttaccgtatttatcaatatggtgaactcattgaaacacgcgccaatgtggacgatttatatactgatgatatggttagctttttaataggctgtagttttacattcgaacatgctttattggaagcaggcataccgattcgacatttagaagaaaatcacaatgtccctatgtatgtaactaatatacctgctaatccaagtgggcaatttaaaggtaacattacagtgagtatgagacccatgaccatgacacaagcaattaaagctacagaaattacgacgcgttttaaaaatgtccacgggacacctattcacattggtaatcctacagagataggtatcacagaccttgctctaccagatttcggtgaacccgttactattaatgaaaatgaagttcctgtattttggggatgtggtgtaacgcctcagtcagttgcactagatgctaaacccgatttaatgattacacatgcaccaggtcatatgtttattacagatataccagatagtcaattaagcgattagtcaaaaacactccgatgccttaacttttttagcatcgaagtgttttactatcttgtttctatatcctcttttgagacaattggatagtttttaaataacactgaacaaacataaccaacaattaaacctattaatccaataatcgcaccatagataaatatttttataggatcattaaaaccgaacataaccaagaaccctgccaatggtgtcgcagtacctgtagcatcatttatcatacctgatgatgcaatcacagcacctgccaatgcacctccaataaaattagctgtgtatattggtaccgggttcgctgatacaacatcagcctgagacaaaggttcaatacaaactgcaattctagatttacgatctcccaattttaatttattgaacattgtgccattgataaatgatgatgcaaaggacaccatcgctgcaatggccattggcataccagttaaaccgagtagcgctgttaaagccattgaacttaacggtgcagtacctactactgtaatgacaccacctaagataatacccataataattggactgacctcagtagaactttggataatatcaccgatttttaataatgaattattgactaatggtgtaacacctacggctactaacctcgctaagggtgcaataattaaaataccaactattaaatcaacaccatctggtactttacgttctgcatatttcattaaataaccaataacataaccagcaacaaaaccaggtattaaatctagtccaccacatgaagcagcaatcgctaatgcatagaccggagatacaccaattgcaagtgcaactaaaccagcagctgcaacgccaccgagacctccggctgcatcaccaagatctcccaaaaatgaaatgcctaataaatctccaccgacatatttgtgaaatgcctcaaccaaaaaagtcgcaatcgctgcatttgctaaggcacccatagctctcatacccataggtgctcgatatgtaaatagtgtaaaaagtgctaacactacaattaaaaacaatgttccaatcaaaatatccattttttcgaattcctcattcctattctagaagtagttaaattaagtacggaaataatttttcaaccatttgctaagcagtatagacaaacattttattaattattactcctactatttcactcatattttatattaacacaaattcgttttatattccgaacaattttattaatttttatttaagctccgcggaacattttgataaatggttttaattatttttaatatattacacaattttatattaattttctttcaaaaagcctgaatatttgttttgtatattttatatgtttaacttttactgtactaaaaaaacgagtatacaaatctaaaaaacaactttagcatttgcacactcgtcttgcggagcattattatattcttctatataaaacaagaaacaccttgtaaattacttatagctaagcagcatgtcaacatacgattagcttaaatttattgatttttgatatcgctgaccggtttggctggtgtacctaacgctagcacattcggcggtatatctttagccacagtactaccagcgcctattactgaaccttcaccaattgttactccaggtaagacaacgacattggcacctaaccagacattagactcaattcgaattggtagtgcttgttctaacccaatattacgttctttatattctaagggatgcactgctgtatataagccacaacttggcccgatgaacacatcatcaccaataaatatcttgccaccatccataaaatagcagtcatgattaataaaaattctttcacctaaaaagatattatatccataatctgtttggaatggacttaacaactccaatgctttcggttcataatttaataattttgtaagtattgtatgacgcgattctttatcactaggtttgatatgatttaattcaaagcacaaatccttagccttcattctctcagcatctaatgattcgtcaaaattagcatcataccaatcacctgctaacattttttctttttcactcatcgtaaatgcacctccatattttttatattcaccctaaataagttaaaagttgatacattaacgttcctgcataatttccaataacataacctaatgtgccaatgataagtatagggccaaccaccttcgtccaacctttgccaattgctaatgcggcagcagttgttggcccaccagcagttgcgttacttgcaagtaaaatttcttctattttaaagccaaaaattttaccaaagattaagcttagccctagattaaagacaaggataattataacaaagataaacaataaaggcgccgttgttattatcgtagcaaatgaggcaggtgtcccaataaccacaaagaaaatataaattagaaatgtaccaatttctgaagcacctgctaaactttcaaagaagtctccccaaactgcaactacaattaaagttaaagtggttaacaataaataaggatctcccaaaaaagaaacaatcaatgtaagaactacattgtgttgcggcatccattgttgaatgagatcagcacctttgaaactaactgctacaagcgtcacagcacttgcaatcgaaaaagcaatatctaataattgtattttttttggctcccaatacgcttgttgagattctggagtactttttgattcatagtcacttttaaattgttttttaattaaaggcaatgaaggtagtgcgattagcagcataaaataaagtgccataacgctattatctgctactacagtagatgaaatcatttcacttggtgtctcaagtttggaactcaatgccgcaaagttaacgcctcctccaatgtaacttccagtcatcatggctcctattttatttaaatatggaatccattgatttaagatcataaatcctaccgttgtaccaatcatggtacctatagaggctacaaaaaatatcactaataatcttctactttctttccaaatcttcaatatattagaactaaaaagaagtaatggaatagataagggcacaatataatcccacacagtatcatatactggcgcgctcattggaatcactttgaaatttgatagtaacattgccccaacaagtgcaataatcgcacccgaaatggtactcgcccatcgataacgttgttctaaaaataaactcaccgttgcccaaacaataatgattgcccataataaccatgtatcatctttagctactattgcacctattagcataaataatcccccttcgacaatctacaatttgttaaattcattctaccagttacctcggattatttttacaattttctgaaaaatgaattgtttataaagttttaaattgatattcttactggtacaggggttataaacaagggggatttacatttatgaaacaaaaaatcggattgattttaggaccattactttttattatcttttattttatacctgccattacaggtttagcagacgcacctagagctgtgttagcagtcacattattcgtagcaacatggtggattacagaagcgattccaattcctgcgacttcattaattccacttattctcctaccacttacaggtggtacggatgaagtgattgcagcaagtgcgtatgcggatcccattgtttttatgtacatgggtggatttattattgcgctagcgattgaaaaatggaatttacataagcggattgcgatgacaatcatttccatgatgggcacaagcagtaaccgcattatattaggaacaatgatcgccactgcctttatatctatgtggatatcaaatgctgcgacagcactgatgatgttaccgattgccttagcacttattcaagaaattaaggatgcacaatttctcaaaccagcatctgcaagtaagtttagtaaagcgctcttacttaccgttgcttattccgcttctattggtggactagctacactcattggttcagtacccaatgcagtctttgctgccgttgcatcatcaagtcttgatcggaaagtatcattcgcgcaatggatgattttcgcagtgccattaacagttattttattagcaattctctacttcctcttaacaaaatggctatttaaaattgaagatgctgaccaaatatcctcagattttgccaagaaagctttgcatgatttaggtccgatgtctaaagaagaaaaattaacaggcattgtctttttactcgttagtttattatggattttcggagggcttttacctgaaacattgcacatcacagatacgattatagcaatgtttggcgctgtgttgttattccttattccagccaaaaatgctaaaggcggattactggtatgggacgatatgaataagttaccctggggaatattactactatttggtggcggtttgtctttagctgcagcatttgaagattcagggttaacaaaatggtttggtggtatgttaggtattgtgaagccactgccattcatactcattgtgattgtattaacaacggccatcctattcctaacagaagtgatgtcaaatactgccgtttcaaatatgttaatgcctatcagtattggatttgcagcagctatcagccaagatccctttatcattatgggtatcgttgccttatcttctacttgtgcatttatgttgcctatatccacgccaccgaatgcagccgtatttagttcggatgagttagaaatgaaagatatggtcaaggctggctttgtacttaatatttttgcaattattgttatttcactctttgcgtatttctggctacctatcgcattcggtttatagctggatgcttcacaataaacgatcgatacgtgctatactgctaaggtatgacacaacatctatactaaggacgcatgttaaattgagcgaaacagtataaactaggtatataaacttataaaaggagtcaataattatgaaatttttaattaagggagcaattgccgtggtcattatacttggtgtcgtgaagacttttgaagatcatgatgtaactgccgaggcaacaaattactataaccaagttaaaaacggtgaaatactacaaagcattgaaaacgtaaattttgacggtataaaaaatttggatttcgaaaagttgattccttctgatttcttttaaagtttataacctcatcaagacatgacacataagtatttaacatatgctatacgttatcttgaggtaacgctatgcatatacaaattggatttactgtatcggaataacgcaattgcaacaaatagattttctaagacaaccttcagactgaagcaacggaccgcttatttaaaagcgccgttgcttttttgtcgtgaattttaatttccctatacattatagtgaaatattataaataattatttataatataattaaattataaaaaggaggttttcttatgaagaaattcattgtaagttcattgttgcttgtctcattttccttaagcactagccctatactcaaagccgctactgtttatactcaaggtgccgtttggaattaaagtataggtagtattgtcgttattagaaagtactcatttcattaaaataaaggagctatcatcatgaaaaaaaaccttactcattatcgttatccttttcgtactattgacagttgccttcttctcatttgataaatttgacagatttaacccattattaaaaaaagaaacctcttatgccatcgttaaattaaacacgcaatactatcaagatttatccatttattctaaacaaggagaaaaacgcagttataaagtgtcatttaatgggtataacccttctgaacaatatgtaaaactaaaacataaaggtacatacgttgaacatatagaatatatcagcaaacaatctttcccatcattaaaatgattaaaaataatatttccaataaaatatttaactttaataaaaggtacttctccccagttttatcaattaaatataagtttccaataacattaagcaatcaaaatgagtcagaaatcagattttctaatatagattttttagtcccatcctgcgaacgatgactagaaaatgaaaaagagtctgaaacatttatgtttgtcccagactcattgtcttattttttccatttctatatttatgaagtaatataatctccaccattaacatgaatcacttggccagtgatatacgaactatccgcataggaagctaaaaatacataagaaggcgcaagttctgctggctgtcctcttctttccattggtgtttctccaccttgattttccactttatcttcagaaaatgtagctggtatcagtggtgtataaataggacctggtgccacagcattgactcgtatgcctttgctcattaaagttgtcgctagtgaacgcgtaaatgcaacaattgcccctttagtagctgaataatcaattaggtgtgcagatcctctataagctgtaacactcgtcgtgttaatgattgcgtcaccttcttttaaatgtggtaccgctgcttgagataaaaacatcattccaaatatatttgtttcaaaagtttctttgatttgttcaggtgcgatatcttcaaaatgatcttgtggaaattgaacaccaccgttgtttactaaaatattcaattctccgaaatcagcaacgaccttttcaattaatttttgtgaatcttcgactttttttaaatcatgggcgtacgcttttgcagtaacacctaaagatgatatttgttcaacgaccgcttcagcatcttcatgctcatcatagtatccaatcgctacattagcaccctcttttgcataaagcactgcgatagcacgtcctataccagagtcaccacccgttattaatgcaactttaccttttaacttgccaccacttttataactttccatttccgttattggttgtgggttcatatctttctgtatacctggctgtctatcttgtgtgtatccttttatttgcttatgaaattctaataaattcattaactatacacctctctgttataatctctatccatttatagataccactttattcttatgacaaacatgaatggcacaacataaattctagacagactatgtgcgttatacaaaaaacactgtaacgatatacgctacagtgttctaaataaaaaccaatgctattatatttaaattgaatgtctgacgatacggcttgaatgtacaaaagccattactgcaaaaataccataaacaattgaataggcaatcatgacgatataaataggagtcatcgttgaaccacccataagaaacataaaggcttttgctgcaaagtaagcatgtaataatgaaacaatgagtggtagaccaaagttgaatatcactttaagtccaagccctttcagcatatcttgatgtgtataaccaatcttacgtagaatacggaagttaggaatttcatcttcggtttcatccatttgtttgatataaatgatacatcctgccgccactaaaaatgctaatcctaaaaatgcagtaacaaatagtagaattcctacagaatcattcatatcttgtcgctgtgttttttgagattgtatgtctggattaatggatttagcaattttatttgccgctttccaatcactttgtttttccaaattatatccatattgatgtttggtttctacagcactttgtttcaattgattatatttatcttcactaacaataagtaccggtccagcatagctcacttcactactgaaatggacatcttcattactgtctataaccttaattgattgatccggtttacttttcagtttaataataccttgatcattatgttgtgcaaatccacctgcagctgctaaattagttatcttagctttgtttccagtaatgtctttatctttaaaatattgattactcgtaataaacatttcagttggcatcatattgccagtgcctccactttccttgaaaaagctatccttcgtcactttcactctctctaattctttatattgttcatcgtaaccaatatgcgcctcatctaatttattttcgaacgcttctgcttgtttttgttctgtgaaattaaaatcttgtggagaactcaacttcacattgtcatcaatcgttgctttgctaattgcaccaaagcataatactgtcactgtcactgcagatattgtggcaataattgttaaagataacgcattctttttcattctatgcataattgaagaagtaaatacaacatctgtaatggacactttaccatgtttagcatttttgattgttttaaaaataactgatactgaacttctgaagaatagatatgcgcctacaactgttaagaacagaatgataaatggtgtgaacatcataccacttgcaaatttaccaaacatttctgtagacatatagtaaccaaagataatcatagcgatacccaaaataccagatatgacttcagcaattgaaatattatttttagttgcttctgattttgaactatcgttcatcattgataaaatactgcgttttcgtaaaaagataaaactttgtatcataattaagcacattgctacaataacgagtaatacagtttgtgtaactgttggaaattggaatgttaatgatacgcttgtactaatatccaatattttaagtacaatcatcagtagaattttcgatccaaaaacacctacgataataccgattacacttgtcactaagaacatagcgatttgttcaatcaaaatcatgcgtaaaatattagatctcgtaagcccaatgagttggtataatgcaaattcacgtgtacgtcttttaacaaataactgatttgcgtacattaaaaagacgataataataacgaataaaaaatatgaaccaacgacagagccttttttaatgatgcctatagaattcgcgttattgatactatctgtatattttaatgtaacaaagctaaaatataatacaatactcacaatgagcgaaaatatatacatcgcatagtgacgtaaattttgtcttaaatttttaagaacaatttgattaaagctcatgtgccacaccacctaaggctgtttgcatatgaataatatttttataaaatgcttgattcgtatcttcaccttggtagacctctgaatgaatattgccatctttcagcatgattactctatttgagtaactcgctgcaacagggtcatgtgtcaccataacgattgtcgcattcatgtttttattaagatcttcaagtctatgcaataagtcttgcgcacttttagagtctaacgcccctgtaggttcatccgcgaagataattgctggtttatggactgatgcacgcgctgcagcagtacgttgttgttgaccaccagaaatttcattaggatatttatctccaagttcttgaatacctaatgcttctgtcacttctttataatttttttctttttcttcttttgacattttttgaattgatagaggcaacataatattttctttaactgtcagtgtatttaagacactataattttggaaaataaaaccgacttctttttttctaaagtctgccaatgctttattactcatttcattcaatttgtgaccattgatttcaactgttccactggtaatataatcaatagaactcaatacatttaacaaagttgtctttcctgatccagacggtcccataatagaaacaaattcacctttttctattgagaattcaatcccttttaatacttcttgttgacgatgtctgtttccgtaacttttcgttagtccttctactttcaatatagacaagccgctcactccttaattactgtatagtcatagcttaacgaatctcaattcttttttcgtttgtttcaactaacaaatatttccatttaaatgacaaacctgtcacatatataaaaagtattttattcaaatcttaaaatgctcagttatatcttatgatataatagctaagttcaattttaaataaggagtacaagagatgttaaataaattaaaaagtgaatggctaactgcaccaggcaccaatgttttagctggtattgttgttgcattagcgctcattccagaggccatttcgttctcaattattgctggtgtggatcccatggtcggtttatattcttcatttattatagcagtggtcatttcctttgtagggggcagaccagctatgatatctgctgctaccggttctgtcgcattagtaattgttcctttagtcaaagatcatggcgtccaatatttgcttgctgcgacaatactaatgggtatcatacaaatcattttcggtattttaaaaataggaagattaatgaaattcattccaaattctgtcatgattggattcgttaatgcactagctattatgattttcatgacccaaatcaaacatatctttggtatttctatcccaacttatttatttgttatctctaccctacttattatttacttgctaccacgcgtatttaataaagtacccgcaccacttgttgcaattatactactaaccataacgtatttaattaccggtgcaaaagttgagactgtgggtgatttaggtgcaattaatcgttcattgccacaattctttattccggatgtaccattcaacttacagacattacaaatcatttttccatactcattatctatggcgattgtcggtctggtagaaagtttattgactgctagaattgtggatcaagcaacagatacatatagtagtaaaaatcaagaatcacgtggccaaggtattgctaatgtagtaactggtttctttggcgcaatgggtggttgtgcgatgattggtcaatctgtcattaatgttcgatcaggtgcaacgacaagattatctacttttactgccggtatatttttaatcattttgattatcatctttggcgactgggttgttcaaattccaatgcctattctcgctgcaattatggttatggtttcaattggtacatttgattggagatcttttaaatttattaaaaaagcacctcgcactgatgcatttgtcatgattttaacagttgcgattgtgctaatctctaataacctagctctaggtgttatcgtcggtgtcgttgtgagtgcactttgttttgcaacaaagatttcaaacgtggttgttacctacgaagaagaggacgacaccattcattattatattactggacaaattttcttcgtatctattgattcattaatgaaccaagttgatttagaattaagacataaaacaatttacttaaattttaaagatgcacatttatgggatgattctgcagtaaatgccatagatactttaatagataattatcataaaaaaaacaatacaatttacgttcagtatctaaataaagatagccgtaaaatcgtaaatgaattaagtaaagtgaatcaacaacatcttttataaatattttccaagactgaagcatgatataccttaattggcatacgatgcttcagtctttttttaaacattgtgtttgacttgtatacctactaggggtatattataaatataaaacaaatgacttaatcgtatgtatccagccattttattttaactataaggaggtcacagcatatgactgaacagaaaaagacgaccattggcattactggaatgacatgtgctgcctgtgccaatcgcattgagaaaaacttaaataaattagatgatgtagaagcaaatgtgaatgttacaactgaaaaagctacaatatcttacaacccagaatcaacatccgcagatgatttaacaaaaaccatagaaaaaacaggttatggtgtgttaaatgaaacagctgagttagatgttattggcatgacgtgtgcagcatgttctaaccgaattgaaaaagtattgaatcgtacagatggtgtagatcaagcaacagtcaatttaacaactgaaaatgctacgatttcctataatcctagtgcaacgtctgttgatgcattaattaaaaaaatacaaaaaataggttacgatgcacaacccaaaaaagaggtggccgaaaaaagttcacaaaaagaattagaattaagaagcaaattagttaaattaatcatttctgcagtgttggccgcgccactcttgctaacaatgcttgtacatcttttcggtatacaaattccatctatttttatgaatccttggttccaatttatattggcaacaccggttcaatttattatcggatggcaattttatgttggagcttacaaaaacttaagaaatggctcagcaaatatggacgtactcgttgcattaggtacaagtgccgcctatttctacagtttatacgaaatggtcaaatggctatttaatgctaatgtgatgcctcatttatatttcgaaacaagtgccgtattaattacacttattttatttggtaaatatttagaaactcgtgcaaaaacacaaacgacaaatgcattaagtgaattattgaatcttcaagccaaagaagcgcgcgttttgcgggacaataaagaacagatgataccgctaaacgatgtggttgaaggcgattatttaattattaaacctggtgaaaaaatacctgtagacggtaaaatcattaaaggaaaaacgtctattgatgaatcgatgctaactggtgaatccatgccagttgaaaaagtgcaagatgataacgttatcggttcaactatgaataaaaatggttctatcactgttaaagctacgaaggtaggaaaagatactgccctcgcgtctattattaaagttgttgaagaagcacaaggttcgaaagcaccgatacaacgtctagccgatgttatttcaggttactttgtacctatcgtcgttggtatcgcagtactcacttttattatatggattgcattcgttcaacaaggtcaatttgaacccgcattagttgccgcaattgcagtactcgtcattgcgtgtccttgtgcacttggtttagcaacacctacatcaatcatggtaggaactggaaaagctgcagaaaacggtattttatttaaaggtggcgaacacattgaacgtacccatcaaatcgataccgtcgtacttgataaaacaggtacgataaccaatgggaaaccagtagtcactgactttgatggtgatgaagaagctttgcaattattagctagcgcagaaaaaggttcagaacatcctttagcagatgccattgtaaattatgcccaaacgatgaatattaaattattagatacaactgacttcgaagcggtacctgggcgcggtattaaagcaaatatatctggcaaaaatttaattgttggtaaccgtcaatttatgaacgacgaaaatgtcgatataaaagattcagaagacatcatgactcaatttgaaaaatctggtaaaacagcaatgttaattgcaatcaatcaagaatatagagggatggttgccgttgcagatacagtcaaagactcaactgctgctgcaattaaacaattacatgatctcaatattaaagtcgtcatgttaaccggtgacaatgaacgtacagcacaagctattgccaatgaagttggtatcgatacaatcattgcccaagtattaccagaagaaaaagcagcaaaaatcaaatcactccaaacccaagataaaaccattgcgatggtgggtgacggcgttaacgatgcaccagcactcgtacaagccgatattggtattgctattggtactggcacagaagtcgctattgaagccgcagatgttacaattctaggcggtgacttattattaatacctaaagccattaaggcaagtaaagcaaccatacgcaatattcgccaaaacttattctgggcatttggttataatgttgcaggtatacctatcgccgcacttggtttgctcgcaccatggattgctggtgcagccatggctctaagttctgttagtgtagtaacaaatgcgttaagattaaaacgtatgaaattataaatgatatataatacaatcatacgactttatgaggaggtgatttatatggctacagaaacaattcaagtagaaggcatgaactgtgaccattgcaaacatgctgtagaaactgcattaactgagcttgatggtgtatcaacagctgacgttagtctagaagccggtaatgttaaagtagattttgacgatgacaaagttacaatgcctcaaatgaaagacgcaatagaagaccaaggttacgatgttaaataaatataaaagaagggacgcttagtcatttaagcgccccttcttttatatatttaatttactcttaaacgcgtgtcacctgtttttatgacttccatcgttgcatctaatgcatcaacaattaaattttcgacagcggcatctgtataaaatgcaatgtgtggtgaaacaatgacatctggtcgttcaatcaattgctttaacatatcatcattaaatgctgtatgacgttgatcactagggaacaagcctttttcaccttcatacgtatctaatgctgcaccttttatcaaacctcgatctaaagcatcgattaatgcacttgttttcacaattgtacctcgagcacaattaataaatacagaacctggtttaaattcattgaataaagtttcatcaaacaaataatcattttccttactagctggaatatgtactgttacgatatctgcattttggattgcttcattgatggtacttgcataagttaaaaagcttctataatcatcattaggtgcaatgtcataagccgttacttcagcgtcaaatccttgcgcaaatatcttagcaacaattgaaccaatgcgacctgttccaatgacagcaactttcaagtctctaatagaacgtgataatatatccggttgccacctaaaatcatattcagcagttttttgttgaatgtcattataattacgaactagattgagtgcttgtgacacagtatattccgcaattgaatgtggtgaataagaaggtacattactaataatcaaattatatttttccgccaattcaaaatcataaatatcaaagccagcactacgttgagcaatttgtttaatcccaaaatcatgtaattgcttataaatggtttcgtccaatggtatttgttgcgaaatagacacaccatcaaatccttttacacgtgagacagtttcacatgttaataaatcttcatctaaatcgacttctactttatgcttattagaccaagcttcaatgaaagctttatcctcatttctaacgccaaaaagttttatacgcgtcatgttagcatcccctttaaaattaatgttattcatacagatgtctcagagattggattctctcggcagctactttcaattgctcatcatcaagcgctaatgatatacgcacatagtttttaccatgctcaccaaacggaatacccggtgcaacaagtatggattgctcttgtaataaatagtcaacaaatgattccccatcaaaatttggcggcgtttttagccacaagaatataccacctttcatcggttcaaatggaatattttcttcctttaacttcgcttcaaaagtatccctacgttgtttgaaaatattactttgttcgtccaagaaatcatcatagtgattcaatgcataggtcgctgcatcttgtaacgcaccaaacatacccgcatgcgtgtgtgtgtgatatttt

SEQ ID NO: 37 - DNA, 667 bp, Staphylococcus saprophyticus
gtcatttaacaaaagccgttgtatctgcaactgctgaaattatcattacaatgaccactaagtgtttcatattgattggttccaaatgttgcgtgtaaatgtgcaaagggctgttcatcaatatgagaaatgttgcccattaaaccgattaattctaatggttcatcaattaatttcttctcatatgtttgtgtttctagattataaaagttgagctctgcgcttgaacaagcgccaataccactgactgtgccaaacttaccattttgttctctagcaatatcagttacagcttctacaatatcttcaccctgttccaatactaaaacaatcgttttgccgtctacttgataaatcataagaaacctccgttctgaaaatggattacaccactattatacaagttcttattaagagtttgtataatagtgtttatagtaaatattttttattgtcatttgctatagaactgttatagaatgttgtaatattaaggttttatcaatgttataaatagccagcaatttatatattaaaaaagaatggagtgagaaacgtgaataagcaatttattatattatattttaatatttttcttgtctttttaggaattggtttagttgttccggtattaccggtttatttgaaagacttaggcttaaaagga

SEQ ID NO: 38 - DNA, 75762 bp, Staphylococcus saprophyticus
  misc_feature (9659)..(9659): n is a, c, g, or t
  misc_feature (75142)..(75142): n is a, c, g, or t
ttagatcctgtttacgcagaagctttaggtgtagatatacaaaatttatatttatctcaacctgatcatggggaacaaggtttagaaattgccgaagcatttgttagaagtggcgctgttgatatcgttgtggtcgattcagttgctgcgcttacacctaaagctgaaattgaaggtgaaatgggagatacgcacgttggtttgcaagcacgtcttatgtcccaagccttgagaaagctttccggtgcaatttcaaaatcaaatacaacagcagtatttatcaaccaaatccgtgaaaaagttggtgtgatgttcggtaatcctgaagttacaccaggtggacgtgctttgaaattctatagctctgttcgtttagaagtgcgccgtgcggaacaattgaaacaaggtcaagaaattgttggtaatagaacaaaaattaaagtcgttaagaataaagtagcaccaccatttagagttgcagaagttgatattatgtatggtaaaggtatctctaaagaaggagaattaattgacctaggtgctgaacatgaaattgtaaataaatcaggggcttggtattcatacaatggtgaacgtatgggacaaggtaaagaaaatgtgaaattatacctcaaagaaaaccctgctattcgagaagaaattgatcaaaaattacgggaaaaattaggtatctttgacggtgacgttgaagaaaaagaagctgaaagtcctgctacactttttgatgaggaagaataactaaagttctggttatcagtagagcgttataaaatataatttgagttatttattactaataacataataataagcttagacattcaagcgtgtctaagcttattttttgtatatgaataagaatataaaaatattatatgaaaatatttttcatttcaaatgtgctgtgagttaagtaagcgcaatcggtaaagtaaatattgtgtaaaaggaacgcttcaaatattgaattaatgtgtatggaaaccttgacacttcttagctgtaaaccgtacaattacattgtatgattcttttagaacttcatataatcatatttaatcatattgaaatttgatatacagagcaaaatcctagataaaaagggggtgtttgtgtgaatttattaggcctcctactcattttgctaggtattattctcggagttgttgtagggtatattgttgcccgaaatttgttgcatcaaaagcaattacaagcaggacaaactgccgaagatattatcgaacaaggtaataaagaagcagagaatattaagaaggaaaagctcctagaagctaaagaagaaaatcaaatcataaaagagcaaagtgaaattgaacttcgtgaaagacgtggtgatcttcaaaagcaggaagcaagacttctacaaaaagaagaaaacttagagcgaaaatctgatctattagataaaaaagatgagattttagagcaaaaagagtctaaacttgaagaacgacaacaacaagtagatgcaaaagagagtagtgttcaaacattaataaataagcatgaacaagaattagaacgcatctctggtctcactcaagcagaagctgcacaagagcaacttcaaagagttgaagatgaattgtcacaagatattgcaatacttgttaaggaaaaagagagagaagcaaaagaagcagtcgataaaaatgcaaaagaactattagcaactactgttcaaaggttagctgcagagcatacttctgaatctacagtttctgttgttaatttaccgaatgacgaaatgaaaggtcgaatcattggtagagaaggtagaaatatcagaacgttagaaacgttaactggtattgacttaattatagatgatacaccagaagccgtaattctttctggttttgacccaattagacgtgaaattgcaagaactgcattagtaaatcttgtttcggatggtcgaatccatcctggacgaattgaagatatggtagacaaagctcgaaaagaagtagacgacattattagagatgcaggggaacaagctacatttgaaataaatgtacataacatgcatccagatcttgttaagatcttaggtcgtttacagtatcgtactagctatggacaaaatgtattgaaacattctatcgaagttgctcacttaagtggtatgttagcagcagaattaggtgaggatattacattagctaaacgtgctggcttacttcatgatgttggtaaagctattgatcacgaagtagaaggtagccatgttgaaatcggtgtagaattagcgaaaaaatacgctgaaaatgaaacagtcattaatgcaatacattcccatcatggtgatgttgaaccaacttcaattatttctatcttggttgctgcagcagatgcactttcagctgcgagaccgggtactcgtaaagagactttagaaaattatattagaagattggaaagattagaaacactatctgaaagttatgaaggtgttgagaaagcattcgcaatccaagcaggtagagaaattcgagttattgtatcaccagatactatcgacgacttaaaatcacatcgcttagcaagagatattaagagccaaattgaagatgaacttcaatatccaggtcatataaaagtgacagttgttcgtgagactagagcaattgaatatgcaaaataaaagttaattattaaacgattaatttttgaaatttaaacaaactaaacgatatttcgtttagtttgttttttttaatattttagaataaaagaacatccgcgacaatttatttatgtcgcggatgtttcacattgaggttaaaaataactgcaatgaaaagtattggtaacaactcattaagataatgtagtatatgtcatacttttatacagtttatcgatacgctcaatgatgtatatggatttaataattcaagttcattgtaattaacatgttaaaatttaagtgagctctaaatctgcctgttgtacttctttaattatttctgcagtatcataacagtttgtagagatattggcatacctttcagctaaacggtatgcattgatatatagctccaaactttctttagctatgtcttctgcatcttcactttttgatggatttgctgtaacaactaagtcagcaaaatgttgtggatcgatattaattgacatgtattacttccaactcctatattttgaattagctcttaactactataatctataccactatttttataattaaaacttagctaatttaataaattttcatcagcaccttttcattgtaaataaattgaattaaactaacactaagagaggatgaacacgtaaatgagattattatttattggggatattgtaggaaaagtagggcgcgaggccattacaacatatttatcaagactgaagcagacatatcgtcctacagttacaattgtgaatgctgaaaatgcggcacatggtaaaggcctgacagaaaaaatatacaaagatttattaagagaaggcgtagattttatgacgatgggtaaccacacatatggtcagcgtcaaatttatgattttatagattcagcaaatcgtatggtaagaccggctaactttccagaagaagcgccaggcgtaggtatgcgatttattcaaataaatgaaattaagctagctatcatcaacttgcaaggtcgtgcttttatgcaagatattgatgatccttttaaaaaggcagatgagcttataaacgaagcaaaaaaagaaacggattatatattcgtagattttcacgctgaaacgacatctgaaaaaaatgctatgggttggtatcttgatggtagagcaagtgctgttgtgggcacgcacacacatatacaaacttcggatgaacgtatattaccaggagggacaggttatattacggatgttggtatgacaggtttttatgatggtatattaggtataaatagacatgaggtgattacgcgttttattacaagtttgccacaaagacatgttgtgccagatgaaggtcgcagtgtattatcgggcgtgattatagatatcaataaagaaggaagaacaacacacattgaacgtgtattaatcaatgacgatcatcctttttaaaatatcgtccattagtatgaatttaaaaaagtaccactctgtacatagtaatagggtggtttattttggtatgatgaacaatgaattattataaccactaggaggcaagatgatatgaaatcacaagtatcatggaaagtgggcggtcaacaaggcgaaggtattgaatctactggggaaatctttgctactgctatgaaccgtaaaggatactacttatatggatatcgtcatttttcaagtagaatcatgggcggacacacgaataataaaatacgcgtatccacgacaccagtgcatgcaattagtgatgatttagatatcttaattgcatttgatcaagaaacaatcgaattaaaccatcatgaaatgcgtgaagacagcgtaattattgcagatagtaaagcaaagccagagaaaccagacaactgtcgtgctcaattgatagacctaccatttactgcaactgctaaagaattaggtactgcattgatgaaaaatatggtagcgattggtgccacttgtgctgttatggacctcgatatttcagattttgaaacattaattacaaacatgtttactaaaaaaggtgacaaggttgtagaattgaatatagaggcgttaaatgaaggttatcgtttaatgaatgaacagttaaataacgttgatgctgattttatcttagataaaacggatggaaagccacatctatatatgattggtaacgatgccattggtttaggtgcgttatcagcaggatcaagatttatggcggcttatccaataacaccagcttcagaaattatggaatatatgattgaaaatcttccaaaagtgggcggaacagttgtacaaactgaagatgagattgctgcagcaaacatggcaatcggttcaaactatgcaggtgtacgtgcatttactgctagtgcgggaccaggactatcgctaatgatggaagcgattggtttatcaggtatgacagaaacgccttttgtagttataaatacacagcgtggtggcccttcaacaggattgccaacgaaacaagagcaatcagacttaatgcaaatgatttacggtacacatggtgatattcctaaaattgtagtcgcgcctactgatgcagaagatgcattttatttaactatggaagcttttaatttggctgaacaatatcaatgtccagtcatagtattaagtgatttacaactttcattaggtaaacaaacggttgaacaattagactataataaaatagaaatcaatcgtggtgacatgatccaatccgatatagaacgtgaagaaaatgacaaaacttactttaaacgttatgcattaacagaaagtggtgtttccccaagacctattcctggggtaaaaggcggcattcatcatgttacaggtgttgaacataatgaagaaggaaaaacgagtgaagctgcagataatagacaacagcaaatggataaacgtatgcgtaaaacagaaaacctattaatacaaaatccagtagaagctgatgtacaacatgaaacagcagacatactatatttaggatttatttcaactaaaggtgcaattcaagagggtaaatcaagattagaatcacaaaatattaaggttaaccacatacaaattagacaattgcatccattccctagtgaaacgattcaaaaagaagtcgacaaagcttcaaaagtcgttgtagttgaacataattatcaaggtcaacttgccaatatattaaaaatgaacgtaaatttaggtgataaattagtaaatcaaacgaaatacgatggcacaccatttttaccacatgaaattgaagctaatggacttgagatagctaaagaaataaaggagttggtataaatggcgacatttaaagattttagaaataatgtaaaacctaactggtgtcctggttgcggagatttttcagtacaagcagccattcaaaaggcagcagccaatgttggtttagaaccggaagaagtagcgattattacggggattggttgttctggacgtttatcaggatacgtaaattcatatggcgttcatggtatacatggccgttcattaccattggcacaaggtgtaaaaatggctaataaagatttaacggttattgcttctggtggtgatggagatggttatgccattggtatgggtcatacgattcatgcattacgtagaaatatgaatatgacttacattgttatggataatcaaatttatggcttaactaaaggtcaaacgtcaccttcttcagctcaaggatttattactaaatctacaccaaaaggaaatattgaacaaaatgtagcacctttagagttagcactttcatcaggtgcaacctttgtagcgcaaggtttttcaagtgacattaaaggactaacaaaaatgattgaggacgcaattaatcatgatggcttctcatttgtgaatgtattttctccatgtgtaacatataacaaagtgaatacgtatgattggtttaaagaaaatttaacaaatatcgatgatattgaagattttgatattaaagataagcaaaaagccactcaaaaagtgttagaatataattcattaataaaaggtattgtttatcaagatactgaaacaccttcatatgaatcacaaattgaagaaatgaacggtacacctttagctaaacaagacattcatattgatgaagaacaatttgaggcattaacgaaacaatttgtataaaatatttttaactaaataagctaatgaactgtcacattattaacgaaataatcatgcacgcattgattgtcgtattgagcatgtgacagtttttttatatgtttgattaagcatgatttgtagtacatattttcattacacgatagagaggacattcattatgatagatcaatttatgtcaatgtcagaactgattgatcacactgaagaacataaagattggcaaattttatataacgagcgagttgcaaaaagtttaataacagctgttcatggtggtgcgattgaacgtggcacatcagaaattgcacaattaattagtgaaattggtggttatagtttttatacatttaaaggaatcaggaaaaataaaaatcatgaacttcatgttacatcaaagcattttgatgagcccatacttaatgaattagtaccgacacatgaagttgtagtatcgttacatggttgtatgggtaatgatgtagcagtttatattggaggtaaagatttagaattatcctatgaaatcacacaacaattacaaaaaataggtataaaggtcaaaccggctccagcacatatagctggaatgcaaacagagaattttgtaaataagggtaaacgtgacgcaggtgtacaattagaactaactgtggcattaaggaaacaatgttttaaaaataataaatataatttacatgatagagagaatcgagagaattggtcgcagttaatgttttcattttccactgcaattgccaatgctttaaaaatattaaatgattaagtacgactttacaaaatcttaagataatagtgcttaagttagggaataggttgaatagaaactatgaagggagtttatttatggcagataaatataaatcaatgactgaattggctgaatatacgactgaaaatagtgattggtcagtggttcgtcgcgacttagatagccaagttattatttaggcgattcatggtggagcgattgaacctggtacaacggaaattgctgatttaacagcacaaaagggtgattttgattattttacttttaaaggaacaaaatcaaaaggaaatgaagcgttacacgtaacttctcgtcattaagaccaaccggatatgatggaaatggtcaaaaataagacgcaagcagtagcaatttatggctgcgtgggtgatgatagcattgtatatatgggcggcaaagatgaaagtttgattcgtgcattaaaagaacaatttgagcaattagatattaaagtagatcaagcgcctaaacatatgtctggtgcacacgatgataatattatcatcgtgtgcacaggtgaaggtgtacagctagaattaacttcgggattaagaaaattgtgctttaaaaatcaaaaatataataaacatagccgagaagaccaaagtaattggagtcagtttatggataactttacaattgcaatcgttcaagcgatacaaaaggtgcagtaacgcttgtaaataatggacacttaagctattatagattcaagatgtctatagtaggaagatgatgataaatgaaatattctaaagcgaccaattatgcgttacacgcgttattatttatgatcaaaaataatggtgatgttcaacgaattccggtacaagatcttgctaaagcattaggtatttctacaacttacttgtcaaaaattttaacaagattagttaaagttggtgttatttcagcgagtagcggtgctaaaggtggataccaattaagtttaaattggcaagatgtaacaatctatgaagtgattacaacaattgatggtaaacaaagcttgtttgaagatagttttaatcatggtgatagttgtccaattaataagttaatgattgaagcggagcaagcgctcataggcagtttgaaacaaaaaaagctaaaggatctcatataaataattgaggttctttagtttttttgtacgagtaatttagatattggatgattataaagctgtacatcatgagtacacatgatgaaatgataattgcattgttgtacattagttttcattttgtttttgaataaagtaacacgcgaataactgtgcgtattatgtttaatttgctaaaatataaagtaaataaagtaattaaggggttgacgtagtatgaatgatacattaatgagtattcagattattcctaaaactgctaacggagaagacgtaattccatatgttgatgaagcgattaaagtaatagatgacgcaggtttaacgtaccgagtaggtccattagaaacaacagtacaaggtgaaatgaatgaatgtttaatattaattcaaaaattaaatgatcgtatggttgaactagaaattcctagtattataagtcaggttaaattttatcatgtacctgaggggataacgattgagacactgactgggaagtatgatgaactttaaaaagttcaaatatagatttatgtatgcgccagatttattttataaataaacttttttttagaaccacttctcaatttattgagatagtggttcttatgcaagtgaaaaggcacttgtaaacccaagccagagcttctcagtttattgagatagtggttcttatgcaagtgaaaaggcacttgtaagcccaagctagagcttctcaatttattttcttcgtattgcttaatctataaactttaattgctgaaagtcattgatttcatactgacatggctacttttgattatatttttgagcgcggcctcattttatgaaatngatgaaagttgtttataaaggttaactgcaaaaaaagttgactttaattatttacaagtctttttgcactttgtgttcaaatttaatataatgtaataatgattatggataaagttatagaacttagaactacgatgttgttaaacaaaatgatgcgaaatcttttgaattacttgttcttagtttttatgatatagaaaggattttgtagagtgaatgaagaacaaagaaaaagtacttctattgatatcttagcagaacgtgataaaaagactaaagattatagcaagtattttgaacacgtgtatcagcccccgagtttaaaagaagcacgaaaacgtggtaaagaggaagttaattataatgacgattttcaaatagatgaaaagtaccgaaacatgggacaaggcaaaacatttttgattaaaacatatggttgtcaaatgaatgcgcatgatacagaagtcatggcaggcatacttggagcattgggttatacaccaacggaagatattaatcatgcagatgttatattaattaatacatgtgcgattcgagaaaacgctgagaataaagtatttagtgaaataggtaatttaaaacatttgaaaaaagaaaaacctgaaacggtcatcggtgtatgtggttgtatgtcacaggaagagtctgtggtcaataaaatattaaaatcttatcaaaatgttgatatgatatttggaacacataatattcatcgtttacctgaaattttggaagaagcttatctttcaaaagcaatggttgttgaagtatggtctaaagaaggagacgtcattgaaaatcttcctaaagtaagagaaggtaatatcaaagcgtgggttaatattatgtacggttgtgacaaattctgtacatactgtatagtgccttttactagaggtaaagagcgaagcagacgaccagaagatatcatagatgaagtccgtgatttagcgcgccaaggctataaggaaatcacattattaggtcaaaatgttaatgcttatggtaaagatattgatggcttagcatatggtttaggagatttattagaagacatttcaaaaattgatattccgagagtaagatttacgacgagtcatccatgggatttcacagacagaatgattgaagtcattgcaaatggtggaaatattgtgccacatgtccatcttcctgtacaatctggtaataatgcagtgcttaagattatgggacgtaaatatacacgtgaaagttatttagatctcgttaacagaattaagacacatattcctaatgttgcacttacaactgatattatagttggttatccaaatgaaacagatgaacagtttgaggaaactttaacattatacgacgaagttgagtttgaacacgcatatacgtatatatactcacaaagagatggcacccctgcagctaagatgaatgataatgtgccattggatgtaaaaaaagatagattacagcaattaaataaaaaagttgcgtattattctgaacgtgcaatgcaacaatatgaaggacaaacagttcaagtattatgtgaaggtgtaagtaaaaaagatgatacggtcttatctggttatacctcaaaaaataaattagtgaattttaaagctcctaaatcaatgattggaaaaatagttaatgtatatattgacgaagctaaacaattttcacttaatggtacgtttatcagtgtgaatgataaaacggtggtgacacaataatgtatgaaaaagatgatattttagctgaagcagaacgtttgagtgaacgtattaaatctctagatactgtcaaagaatatcataaagtagaatcacaaattcatcataatgaaaatttagaacaacgaatgaaagaattaaagaaaaatcaaaagcaatcggtcaatttgcaaaattacggtaaaacacatgcgttacaggcctcggaagaaaagattcaagacatcgaagaagatatcaatatactgccaattgtagaagaatttagagaatcacaagcagaagccaatgatttattacaaatgatgattcacacaatgtccgatagattaaataaacaccaagaataagcaattttttattgcacttatggaaagggtttgaacactatgaagactaaaaagttaacattaacagcaatttttattgctataaatgttgtgttaagcagtataattgtgattccactaggtcctataaaagcagcacctatgcagcatttaattaacgtactttgcgctgtatttgtaggtccttggtttggacttgctcaagctttcatttcatcaatcttgcgcatgatttttggtaccggtagtttctttgcctttccaggtagtatgattggtgtattactcgctagtggtttttattattatagaaagcacctatttatggcagctgtgggagaagtgattggcactggaattatcggtagcatcatgtgtataccacttgcttgggtccttggtttttcaaatcttgcaattaaaccattaatgctcgcttttattgtttcaagtgtaattggggcaattattagttatatcattttaatgatattgaagcgaaaaggcattttaaaacgctacttataaaacactattattatgagattgagacatattattttaatcaataagtaaatttatgaagttaacttgtaatcgttaaggtcatttattacttaaagataaaataaagtgtcttaatctcttttgttatatatgggagttggattatgaaatctctattagaaaatttgatttctgtcccgctcccattgaatttttaatatgatgagaaatgtttaaatttaataaacaggcgtaaattgaaaacttatgttaaaatttaagagttaaattagctagaaaagctgaaaatcgtgtggttattaaaacaaatttcaaacaatataacgagatagtaaaatgatattagatgtaagtacatctcttataatcaatgtaggatgagatgcaaaaagacaaaacttactttctatgactaaatcaatgaactaagtgaaaataagaaaaataaaaggattgtgaaatatatttatgacaaaccaaaccccaatgatgcagcaatatttaaaaataaaatcacaatatcaagattgcctattgttttttagattgggtgacttctatgaaatgttttttgaagatgctaaagtagcatcgagagtactagaaattactttgacaaaacgtgatgcaaaaaaagaagacccgattccaatgtgtggtgtgccatatcattcagctgatggctacattgagacattaataagtaacggttataaagtagccatttgtgaacaaatggaagaccctagacaaactaaaggcatggttcgacgtgaagttgttcgtattgtcacgcctggtacagtaatggatcaaggcggtgtagatgaaaaacaaaacaattatattctgagttttattcaaagtgcatcaatgtatgcattgagttattgtgatgtttcaacaggtgaattaaaagtaactcattttgaagatgaagcaactttaattaatgaaattacgacaataaatccaaatgagattgttgttaaagaagccattggtgaatcgctaaaacgacaaattagtctaacgacagagactatcacggtgcttccagatatttctgatgtaaaatatgatgttaatacaacgaatgatagccatttatatcacgtaacacaattattattagattatgtttatcatacgcaaaaaagagatctttctcatattgaatctgtgattacatatgaagcagtagactttatgaaaatggacttttacgcaaaacgtaatcttgaattaacagaaagtatacgtttaaaatcaaaaaaaggaacgttactttggctaatggatgaaacgaaaacacctatgggtgccagacgtttaaaacaatggatcgatagaccgcttattcaaaaaaagcaaattgaatcacgtcttgatacagtagatcaatttatcaatcattttattgagagagatacattgagaggctatttaaatcaagtgtatgatattgaacgtctagttggtcgtgtgagttacggcaatgttaacgcacgtgatttaattcagctaaaacattctatttcagaaatacccaatataaaaaatctcttacaagcttttgatgaacaaatgacagcacagtttgaggcgttagaaccactagatgatttgcttaatttattagaagaaagtttaaaagaagaaccacccatttcagttaaagaaggcggtttatttaaaactggatttaatgaaacgcttgatagctatttagaagcttcaaaaaatggaaaaaattggttagcagaattacaaacaaaagaaagacaacgaactggaattaagtcattaaaaattagttttaataaggtttttggttatttcatagaaattactagagctaatttacaagggtttgatcccactgaatttggatatcatagaaagcaaacactttcaaatgcagaacgtttcattaccgatgaattaaaagagaaagaagatatcattctaggtgcagaagataaagctattgaattagaatatcaattgtttgtgcaacttagagaacaaattaaagcatatacggaaagattacaaaaacaagcaaaagtaatctctgaactggattgcctgcagagttttgcagaaatagctcaaaaatataattatgctcgcccgacttttagtgaagataagacattagaacttgttaattcacgacacccagttgtagaacgggttatggatcataatgattatgtgcctaacgattgtgaattagataaggaaacgtttatatatttaattactggccctaatatgtcgggtaaatcaacatatatgagacaagtcgcaattattagtatcatggctcaaatgggtgcttatgtaccatgtgaatcggcaatattacctgtgtttgaccagattttcactagaataggtgcagcggatgatttagtttctgggaaaagtactttcatggtagaaatgttagaagctcaaaaagcacttgcacatgctacagaacacagtttaatcatatttgatgaaatcggtaggggtacatcgacatacgatggtttggctttagctcaagcaatgattgaatatgtcgcacatacgtcgcatgctaagactttattctcaacacattatcatgaattaactacgctagatcaatcattggcatgtttgaaaaatgtgcatgttgctgcaaatgaatacaatggtgaattgattttcttacacaaagttaaagatggcgccgtagatgatagttatggtatacaagtagctaaattagcgcatttaccagtggaagtgattaatcgagcgcaagtgatattggatgcatttgaacaatcgaataatcaaacaaacaataagaataccatgaatcatgttgatattcctactgataaaaatctaaatgcttcaagtgatgaagtgacagaaacaaaagctacgtattatgttgataatgaacagtcagctgcaacacaacatgcaaaaagtgatggacaatttgagcaagctgcctttgatttatttgattcgcctgcaaaacaaagtgaaatagaaaatgaaattaaaacattaaatttatcaaatatgacgccaattgaagcattagtaaaactaagtgaattacaaaaacaattgaaatagaggtgaagtcatatgggtaaaattaaagaactacagacatccttagcgaataaaattgctgctggcgaagttgtagaacgacctggatcagtagtgaaggaattgttagaaaatgcgattgatgcccaagcgactgaaatcaatatagaagttgaacaatccggcgtagcatctatacgagttgtggataatggcacaggtatccacatagacgatttaggcctcgtcttccacagacatgctacgagtaaattggatgcagatgatgacttattccatatacgtacactcggtttccgaggtgaagctttagcaagtatctcttcagtagcaaaggttacattaagtacatgtacagataatgaagaaggacaacagatctatgtggaaaatggtgaaatattagatcaaaaacctgctaaagcgaaacgtggtacagatatcttagtagaatcgttattctataatacgccagcgcgtttgaaatatattaagagtttgtatacggaattaggcaaaattacagatattgttaatcgtatggcaatgagtcatccagatattcgtatttcattaatatcagatggcaaaacgattatgaaaacaaatggttcgggccgtacaaatgaagtaatgtcagaaatttatggtatgaaagtggcaaaagatttagtgcatatttctggtgacacgagcgattaccatttagaaggttttgttgcaaaaccagaacattcacgtagtaacaaacattatatatcgatttttatcaatgggagatatattaaaaatttcttgttaaataaagccattttagaaggttatcacaccttgctcatgataggtcgttacccaatatgctatatcaatattgagatggatccaattctagttgatgtcaacgttcatccgactaaattagaagtaagactgtccaaagaggatcaattatttaatttaatagttgaaaaaatacgtgaagcttttaaagatcgtattttaattccgcaaaatgatatggataaaattaccaaaaagaataaagtgttggatcaatttgagcaacagaaattagattttgaaaagaaacaacaacaagagaatcattcacaacctgtaaatagccatgaggaagatgaaaagaatgacgacaaagcatatcattccagtcaaactcattacgaacctacagattatatactgaaagaggaaaacaacacatcagtttctacatcgcctaatagtgatgatgactatacccaaacgcaaaaatctgttttatatgatttagaaaatgaaaatcaatctgaatttataaatgaagctgattttgattcagatataagcaatcactcagattctgatattaaaggaagtgtcagtaaagacccttcacgtcgtgtgccttatatggaagtggtcggacaagttcatggcacatacattatcgctcaaaatgaaaatggtatgtatatgattgatcaacatgcggcacaagaacgtatcaaatatgaatattttagagagaaaattggtgaagtgacgaatgaaattcaaaatttgttaattccgttaactttccacttttcaactgatgaattaatgattattaatcagcacaaagaagagttagataaagtaggcgttcatctcgaaccatttgggggtaatgactatattgtagatagttatccggtttggtttcccacagctgaagcagaagaaattataaaagatatgattgaatatgttttagagcataagaaagtaaatgtaaaaaaaattcgagaagacgctgccataatgatgagttgcaaaaaatcaattaaagcaaatcactatttaaaaaataatgaaatggcagatctagtcaaccaattgagagaaactgaagatccttttacttgtccacatggtagaccaattattattaatttttcaaactacgaattagaaagattgttcaaaagaactatctaggaggtaagtggatgaaaccatatattttaccagcaattagatcaatgaaagatttagaaaaaatgacgcaaacagattataaagaatgcgtattgctcgatacacatattggtcatattaaaagtataatggatttattaaataagcatcacattgaaacatatatgcatattgatttaattaagggcatgagtcacgatgaatttgcctgtgaatatattattcaaaattatcatcctaaaggtattgtctctactaagactaaagtgatcaacaaagccaaagcattgaatacgacgactgtgttccgtgtttttgtattagatagtcatgcattacgtagaagtattgaattaatcaaacgtgtagaaccagactatgttgaagtattaccgggagttgcaactaaagcaatacaaattatcaacgaggaaacgaacacgtctgtaattgcaggtggattaatcaatacggtagaagaagttgatatcgcagttaaaaatggtgctaaatatataacgacaagtgatcgccatttatggtaaccatcatgaagaaaaatatcaattctatttaaaccaaatttaagataaaagctaggctagccaaacacagagataatattgctatttgacaaagatattagcgatactctgttagcgctagcctttttttctgatattgttaaaggattcaatatatatgttatgattagtggaattttattagattgtgttaaggggtgatttgatgattaaaccaaaacaattaaagcgtggcgatacggtagcaattgtttctttatcatcaggactagctggtgaaactgacatgttatggcgtacgtatcaaggtattaatcgattgaaatatgtatttggtttaaatgtgaaggtaatgccaaatgctttaaaaggaagaacttatattagccaacatcccgaagcgcgggctgaagattttaataatgccgttaaagatcccacaataaagggtattatcagctgtattggtggtgatgatgctattaaaatattgccatttgtgaatctagaagcactacgggagcacccaaaaattttttcgggctattctgattcaaccacggttcatatgatgttttataaaatgggtgttgtcagtttttatgggcctgcattactgacagattttgcagaaaatattgctatggacgattatacggttcgagatatagagaaattttggtttaatactaatataataggtgagattcttccagcaaagtatattagaccatttggattagcgtggcatatagaaaataaaatgattgctagacaaacgatacaacaacaaggttatgagttgattcaaggatatggtattaaacaaggacacttaattggtaggaatttggaaacattgactagtttaataaacacggacttatttccaaataagacagattttgaagatgctattatatttttagaaacatctgaagatacaccagatcctcaagcatttgaagcgatgttggtccaattaattcaacaagatgcattaaaacagtgcaatggaatgattataggtaaaccatttgataatgtgtattacacagcttataaagaaaaaatattagatgtattgaaacaatacaattacacgaatataccagtattatacaacatgtcttttggtcataatgagcctaagcacatgctaccgtatggtttacaagcaaaaatagattgtaataaaaaacaatttaaaatcaaggaaaatgctgtcaatatcacttgaattgtgacaagatttttacaaaaagattgacaacgcttacaaaatcggtgtaagatgaacacaagttaataaatagaacagagatgggagatttctacagtaattaaaccggtggttcgcaactggctataattgtaggaatctctctatctttttttaggaggagtctctatgagtgtgtattttgctgaatttttgggaacagcaatactagtattatttgggggtggcgtttgtgccaacgtcaatttgaaaaaaagtgccggtaacggtgcagattggattgttattgcattaggttgggggcttgcagtttcaatgggtgcatatgcggttggaaatatttccggagcgcatttaaatcccgcagttacattagcgtttgctatggacggcgcgttaagttggagtatggtactaggctatatcgtttgtcaaatgctcggcggtattttcggtggtgttttagtttggttaatgtatttagcacattggaaacaaacagaagatcaaggcgcaaaattaggtgtattctctacagcaccagcaattaaaaattattttgccaactttttaagtgaaatcattggtactgctacacttactttaggattactatttattgggatgaataaaattgctgatggattaaatccattaatcgttggcggtttaattgtagcgattggtttaagtttaggtggaccaactggctatgccattaatcctgcgcgtgatttaggacctcgtattgcacatgcgatattaccaattgctgggaaagggaaatctaattggagctatgcgattgtgccagttttaggcccaattactggaggaatgattggtgcagtcatttatagattattctataaaggcgcgtttgatacaatgtcagttgtagcgattgtattactaattgttactattgcgcttggtatagtgttaaataaagctaaaagtgcaaaaggtatcgaatctgtatattgattaagttttaaacagtcctgtttataagttaaactataagcaggctttatattataacaatttttgatttagattaatgtttgtaaaaatgaatatatggcaatgtgtataataacgtgtaaaaaagagttacatatatatagccacgataaacgagataagagggagattttaattatggaaaaatatattttatcaattgaccaaggaacaacaagttcaagagcaattctttttgataaagaaggtaaaattaaaggcatcgcacaacgtgaattcaaacaattctttccaaaatctggttgggtagaacatgatgctaatgaaatttggacatctgttttagctgttatggcagaagtattaaatgaaagcaatgtaggagcagaacaaattgctagtattggtatcacaaaccaacgtgaaacaacagttgtgtgggataaacatacgtcacgtcctatatatcatgcaattgtatggcaatctcgtcaaacacaaggtatttgtcaagacttaaaagaacaaggccttgaagataaattccgcaataaaactggtttgcttttagatccttattttgcaggtacaaaagtgaaatggattttagataatgtggaaggtgcaagagaaaaagcagataacggtgatttattatttggtacgattgattcatggcttgtttggaaattatcaggtggacaagcgcatattacagattatacaaatgcaagtcgtacattaatttataatatttatgatttagaatgggatcaagaattattagatattttagaaattcctaatacaatgttacctgaagtcaaagcatcaagtgaagtttatgcacacacaattgattaccatttctttggtgaagaagtacctatttcaggtattgctggcgaccaacaagcagcattattcggacaagcttgtttcgaccgtggagatgtaaaaaatacttacggtacgggtggattcatgttgatgaatacaggtgaagaagctgtttcatctaagagtggtttattaactacgattgcttatggtttggacggtaaagtgaattatgctttagaaggttcaatatttgtttcaggttctgcaattcaatggctaagagatggattaagaatgattaattcagcgccacaatctgaaaattatgctgaacgtgttgaatcaacagagggtgtatatgtcgtgcctgcatttgtaggtcttggtacaccatactgggacgcaaatgcacgtggtgcaatctttggattaacacgcggcacagaaaaagagcatttcatccgtgcaacattggaatcactttgttaccaaacacgtgatgtattagaagcaatggaaaaagattctggcatcaaagtaaataatttacgtgttgatggtggcgcagtaaaaaataattttattatgcaattccaagctgatttattaaacttaggtgttgagcgtccagaaattaatgaaacaacagcattaggtgcagcgtacttagcaggtttagctgtaggtttctgggatagtaaagatgaaattgctaatcgttggaacttagaaaaagaattccaaccagatatgattgaaaaagatagagaaagattatataaaggttggaagaaagctgtagaagcaacacaagtatttaaattagaagatgagtaaaaaattagacttaatattgttatatatgctacaatacgggtaagttaataatatcgagatgagaaatgagagattcaattcgtacaattatatatgtatgggatgaatctctctttttttaatactttaggaggcgcttgtttattatgagtttatcaacgttgaaaagagaacaaataaaaaaagatttaaaagatcaagaatttgatgtcgttatcattggcggaggtatcactggtgctggtattgctttagatgcaagtgaaagaggtatgaaagttgcacttgttgaaatgcaagactttgcacaaggaacaagctcacgttctacgaaattggtacatggtgggttacgttacttaaaacaacttcaagttggagtggtagctgaaactggtcgtgaacgtgcgattgtttatgaaaatggaccgcatgttactacaccagaacgtatgcttttaccaatgcataaaggcggttcaatgggcaaattcactacttctattggattagcaatgtatgatagattagcaggtgttaagaaagctgaacgtaaaacaatgttaaatgctaaagaaacattagaaaaagaaccattagttaaaaaagctggtctaaaaggtggcggttcttatgttgaatatcgtacagatgatgcgcgtctaactattgaagttatgaaacgtgcagaagaaaaaggtgcgaaagttattaatcatacaaaatcagtacatttcacttatgattcaaatgaaaaagtcaacggtatacaagttgaagatcaaatcagtaatgaaacgtatccaatcaaagctaaaaaagtcattaatgcaagtggcccatgggtagatgaagttcgcagtggagactatgcacgtaacaataaacaattacgtttaacaaaaggtgttcacattgttattgatcaatctaaattcccattaggtcaagcagtttatttcgatactgaaaaagatggacgtatgattttcgctattcctcgtgaaggtaaagcatatgttggtacgactgatacgttctatgacaacaataaaacttcaccattagctaaccaagaagatagagactatctcatcgatgctattaattacatgttcccagatgtaaatgtagctgatgaagatattgaatcttcatgggcaggtgtcagaccgttaatcttagaagaaggtaaagatccatctgaaatttcacgtaaagatgaagtatgggaaggtaaatctggtttattaacaattgccggtggtaaattaactggttatcgtcatatggcacttgaaattgtggatttactatctaaacgcttgaaatcagaattcggtcttaaatttgataaatgtgcgacgaaacacttaactatctcaggaggagatgttggtggtagtgcgaacttcgataagtttattgaacaaaaagttgaagaagcaaaatcttatcaaattgatgagtcaactgcacgtcactttgcttcaaaatacggttcaaatgctgaagaactattcaagattgcacaaacagcacaatatcaagaaactggtttgcctttagacatttatactgaattagtttattcaatccaaaacgaaatggtatatcgtccaacagacttctttattcgtcgtacaggtaaactatacttcaaaattgatgacgtcttaaattataaagaacaagttattgatgtcatggctggcttattaggatacacaaatattgaaaaagaagcttatacaaaagaattacaaattgcaattgatgaagcacaaactggtaatcatcaaccagcagtaaaagaataatttaaagtactttttcaataatataatttaaatagaaatagctgctaactttgcgaggttggcagctgtttttttaaccaaaaatggtaatttaaagcatgattaaaatttgaaaatacttttattaaaacaatgtttgtacatactgagctgattgcgtactatttgataacatgctcatttgaaggtatattgtataatatacaaaaatataagtcgtaaagtatgggaggcctataacatgagtaaaaatgaatttaaaattacagttgcagatggcacaatgatagaagttaaattgaataaagctaaaaaaacaactatcggtgtcgtgcatatacttcatggaatggcagagcatatggatcgatatgatcagcttgtggaatcattaaaccaacaaggttatgatgtgttacgacataatcatcggggccatggcaaagatataaatgaagatgaacgtggacaaattgatgacctgtctcaagttgcggaagatgcatatgaaattgctgaaacggtgtgttcacattatcaacatatcccatatattattataggacattcaatgggatcaattgtgggacgtatattcgctcaaagatatccagatgtagctcaaggtatgatattaaccggaacaacgcaatacccaacctttttgagcatttccatttgtacattactaaaaataattacattggtgttaggaaaacatcgtagattagattggttaaacaaaataatgtataaatcgtttaataaaaatattaataaccaaaaaacgacaagtgactggctctctagtgatgcgaatgaagtagaacaatttataaaagatccatatacaggatttttagtctcaaatcagttgatttatcaagttatgaaacaaatggtatcaacaagtcgaatgaaaaatataaaacaaatgaacgccaatcttcctgtattgttaatttcaggtaaagatgatcctctaggagactatggtaaagggattaggaaactgggtagattatataaaaaagcaggtattaaacatatcacagtacaactgtataaaaataaaagacatgaagtactttttgaaaaaggctatgttgaaacatggcatcatatgtatgaatggatagaaaaacaaattttaaaaaagaaaaagtaaatagcaaataaataaagagagatgatacacgtggaaaatgacaagccctttatagttgttcttgttggaccaactgcagtaggtaagactgaatttagtattgaattagccaaaaaatataacggcgaaattatcagtggagattcaatgcaagtttataaaaatatggacatcggcacagcaaaaataacacttgatgagatgtctggcataccacatcatatgatagacatattagaacccgatgaacctttttcggcttatgaattcaaaaacagagcacaaaaattaatcaaagaaattactcatagaggccgtgtgccaatcattgtaggtggcacaggtttatacatacaatcacttatttatgattatgccttcgaagatgaaactatttcagaagcgcatagcgaaagtgtagaaacgcagctagcggaacttgatcaactatcaaatgatgaattacatcagtatttggcatcgtttgatgaaatttctgcgcaagatattcatcccaataatcgaaaaagagttagacgtgctatacaatattatttaaaaacaaaaaaacttttgagttcacgtaagaaagtacaacaatttacagaaaattatgatacattattattagggatagaaatgtcgcgtgacatattatatcaaagaattaatacacgtgttgatataatgttggaacgtggattattaagtgaagtgaaacagctcgttgaaaatggttatgaaacaagtcaaagtatgcaagccattggctataaagagattgtacccgttattaacggacaaatcagtctagatgaggcaactaataaattaaagcaacattctagaaattatgctaaacgacaaatgacttggtttaagaacaaattagacgtcttgtggttagatagagagaaaatgtcactttcactaatgttagatgaagtttcagtccaaatacagaaaaggagaacataaaatgaatacaacagaaaacatccaagacaaattcctaggacaatttaaggctgatcaaacaaaaataattgtatttttagtgaatggttttcaaatgaaaggtacgattgaagattacgataaatacatcgtatgtttattatctcaaggaaaacaacaccttatttataagcacgccataagtaccttcactattgacgaagcagccacaactgaagaaaggtaatttacatttaaaaattatgaaaaatacttaagtaaaaccgaggttggaacaaataaatgtttcaaccttggttttttgtataaaaaaagcattgccgtgtttaagtaaggatacgataatgctttttaatatcatatatgaaattgtattttcagttatagtaatgcttcaatttctgattccaattgacttggttttttctgtggtgaaaaacgttgaactacatcgccatttttatccactaaaaatttagtgaaattccattttattttttcattgaaaaatccattttgagcttcagttaaaaatttaaatagaggatgttgttgttcacctttaacatcaattttttcatgcattgggaaagaaacaccgtaattgattttacagttttgagtagcttcctcacctgtaccaggttcttggccaccaaattgattacaagggaatcctaaaatgatgaaatcttgatctttatacttatcatataatgcttgtagcccttcaaattgtggtgtaaatccacattcactagccgtgtttacaattaacatcactttgtttttataagcatctaatttataagcatctccatttggtttttgtacttctatgtcgtaaatagtcataatacttcacctctttttattaatttaacataatttaagtttatagtctttattttggcactatgatagaatggcaaagaatactttgaaaagaggtgcatgttatgacccaacaacaaacatatacaacggaacagagtttagaaacagcaatattagttggagtacatgctcaaacggatgaagactttaactttgagtcaacaatggaagaattagcgtctttatctcagacatgccaattaaacgtaaaagcacagtttagccaaaatagaactaacgtagacaataaattttatgttggtaaaggtaaattggatgaaattaaagcatatgttgaatttcatgacatagacgttgttgtagccaatgatgagcttacaactgcacaatccaaaactttaaatggtaatttaaacgtcaaaataattgatagaacgcagcttatattagaaatatttgctctacgcgcacgtagtaaagaaggtaaactacaagtagaattagcgcaattagattatcttatgcccagattgcagggtcatggccgaagtttgtctcgactaggtggcggcatcggaacaagaggtcctggtgaaacgaaattagaaatggaccgtagacacatcagaacgagaatgaatgagattaaacaccaattagaaacggtagtagaacaccgtgaacgctatcgtaataaaagagaacaaaatcatgtatttcaagtagcattggtaggttatactaatgctgggaaatcgtcttggtttaatgcattagcaaaggaatctacttatgaaaaaaaactgcttttcgccacacttgatcccaaaacgagacagatacagataaacgacggctttaatctcatcatttcagatacagtaggatttattcaaaaactaccaacaacacttatagcggcttttaaatcaactttagaagaagcaaaaaatgcagatttattattacatgttgtcgatagtagtcatcctgaatatcgcgcgcaatatgataccgttaatcaaattgtaaatgatttagatatgggacaaatacctcaggccatcatttttaacaagaaagatttgcatgatggctcattaccagctacaaacaaacctcatgtgtttgtttctagtaaagatgaaaaagatatagagaaagtaaaatcattgttatttaatcaaattaaacaagtgcttacttattatgaagaaagtgtaccgagtgcaaatgcagatcgcttatactttttaaaacaacatacgttgatatcagaattagtatttgacgagataaatgctaattatcaagttaaaggatacaaaaaagaatagaaggaagttatgaaaatggaagagatgaaacaactgattgcggacacagaggctacattagcgccatattttaaagcaatagaagaaaccgcctttgttaatcaggaaaaagtacttaatgcgtttcatgaagtgaaagctactgaaagtgatttacaagggacgacaggttacgggtatgatgattttggtagagatcatcttgaagaaatttatgcacacacgtttaaagcagaagatgctttagttagacctcaaatcatctctggtacacatgcaatcacgattgcgctgcaaagtactttgaaacatggtgatgagttattatatatcactggcaatccttatgatactttattagaggtcattggtatcaatggcaatggtattgaaagtcttaaagaacatggtgtccaatataataaagtggatttgaaacatggtgatatagatatagaaacggtaatgcaacaaattcatagtcgaacaaaagtcatcgctatccaacgttccaaaggctatgaccaacgtccttctatcaatttaaatttaatcgaaaaggccatacaacaaattaaggcgcaatatccagaaatcattatttttgtcgataattgctatggtgaatttgtagaagaacgtgaacctattgaatgtggagcggatttaattgcaggctcattaattaaaaatccaggtggcggtttagcaaaaatcggcggttatattgcaggaaaaaaagatttaattgcacgttgtggttatcgtctaactgcgcctggtataggtaaagaagcaggtgcatcactcaattcgttacaagaaatgtatcaagggttctttttggcaccacatgttgttagtcaaagtttgaaaggggctttatttacaagtcttcttctagagaagatggatatgcgaacaagtccaagatacgatgaagcgcgaacagatttaattcaaacggtttcttttgagaataaagaacaaatgattcagttttgtcaaagtatacaacaagcctctcccattaatgcacatttcagtcctgagccagcttatatgccaggatatgaagacgatgtaatcatggcggcagggacatttgtacaaggatcttctattgaactttctgctgatgggccaattagaccgccatttgaagcctatgttcaaggcggattaacatatgaacacgtaaaattagctgtctcaagagcagcgagaaatctaaaatcacaacaattgatttgatttttgaatgaacttccatatatgttttgtaaaaagagatagtatatacatgctattttaatttataatcccatatatggatttttttgaataaatttaaggaattttctaataattatagatttaaggcgacgaattaacagatgaaagtagtcatatcaagggatgagaacttcatgttagaaaaccttacatatctttgaattaatctgattattatgctaaatttattacaagttcaaaagtagaggtgatcggattgaagtcaaatgatacattacgacgaagtatgcccgttttccctatgagtgttgtaacaaaattaagtgaattgtctgctaggcaaattcgttattatgaaacacatgaactcgttaagccacaacgatcagaaggaaacaaaagacttttttcattaaatgatttagaacgcttacttgaaattaagaagttaattgaaaaagggttcaatattaaaggtattaaacaaattattaatgatgaacaagatcaccttactgatgatgaacaagagacaagaaaacaaatgatagttgaagctacacagaaaccagagcgagaagcaattccaataaatcgtggtgacttatcacgttttattaaataaaaatacgggggacatatattatgccaaaacgttcatttacaaaagaagatattcataagtttgctaaagaggaaaatgtaagatacttacgactacaatttacagatatattaggcgttattaaaaacgttgaagtaccagtaagtcaattagagaaagtattagataacgaaatgatgtttgacggatcttcaattgaagggttcgtacgtattgaagaatctgatatgtacttatatccagatttagatacttgggttattttcccatggactgctggtcaaggaaaagttgcacgacttatttgtgatatttacaaaacagatggtacaccatttgaaggggatccacgtgcaaacttaaaacgtgtcttaaatgatatgagagaattaggtttttctgaattgaacttaggacctgaaccagaattcttcttattcaaattagatgaaaaaggagagccaacattagaattaaatgatgatggtggttactttgaccttgcaccaacggatttaggtgaaaattgtcgtcgtgatattgtattagaattagaagatatgggctttgatattgaagcgagtcaccatgaagttgcacctggacaacatgaaattgatttcaaatatgcagatgcaattacagcatgtgataatattcaaacatttaagcttgtagttaaaacaattgcgcgtcaacataacttacatgcaacatttatgccaaaaccattatttggcgttaacggaagcggtatgcattttaatatgtcattattcaaaggtaaagagaatgcgttctttgatccagatggtgatatgcaaatgactaaagatgctttccatttcgtagcaggtatcttaaaaaatgcacgtggatttacaggcgtatgtaatccattagttaactcatataaacgtcttgttcctggctatgaagcaccgtgttatattgcatggagtggtaagaaccgttcaccattaattcgtgtgccatcatctcgtggactatcaacacgtgttgaggtgcgttcagtagacccggctgccaatccttacttagcattagcagcaatattacaagctggcttagatggtattaaaaataaacttgaagtaccagaaccagtgaatcaaaatatctatgaaatgaaccgtgaagaacgtgaagcggttggtatacaagatttaccttcaactttatatactgcaattaaagcaatgagagacaacgaaccaatcaaacaagcacttggtaatcacatctatcaccaatttattaactctaaatcaattgagtgggattactacagaactcaagtttctgaatgggaaagagaacaatacatcaagctttactaggtgctaaacaaaggggttaaacactaggaatataagcaatccatttattctttatgaatagattgggttgcttttttgcgcccactcattaaaaataaccaactatacctttagcgagttatagatggtcataaaaataaaataattataaaactgtatcgctttttttaaagcatgtaattaaccgatacacacagtgtgttaccaatttgtatgtatcaataagaataataaaaaatgatcaaatatttgagttattcaagctatattagatttatcagatttaataaaaaagatagaatgcactcgtaaaagttaacgagccattctatctttgaacattagtgatgaaactaatgtttaaccaaatattgcgtgcgaaaatggtattaaatataagacgattaatgtaagacttactaaaaagtatataataaacgcacgcacttcttttgacttaaagaagataatcacctcactcatgtttagtgaactttaattgtagaacaagcgaatttatcagtcaactttgacttattaatgggaagaagattgactaattacctttaaaatttgtgtgcaatataaacctatagtataatatacttaataaaatttacttatcataaggggatggaatcatgcaagaagtaaaattagtaacattaaaagcactttcactagatgatttagaaaaagaaattaataactatttaaaaacagacgaaatatctggttataaattattaaattctactgtacgtgaagttgaagaacgtacattttcagctaacgagcaagaatttcatgcatttttaacatttacaaaagatatttaaatggcatatcattaattgaaaacactgcgtagaaagattaatttctttctgcgcagtatttttttgtgccaaagctaatatataaacaactataataatattatgtaaactttataatttcataatattcattttacttaatgacatttgtcatatgtaatttatgacaatattcactactgtctttctattagattcgtcatacttaaagtaggaaatgaaaggagtgtataaaatgattaaaataaaacatttaactaaaacttataaacgagtaaaagtagttgatgatgtgacgtttgatataaatgaaggtcattgtactgcattaataggaccgaatggcgctggtaaatctacgcttatagacatgattataggtgatcgacatgcaaataaaggcgaaatactagatacggcacaattattggattctaagaatttagggattatgtttcaaaaaacaaattttccagatttaataaaagtaaaggaactttaccaactgtttgctcatttatatacggatgccattactttaaaagagtttagtgaaattacactttttaatgaaagtcaattaaatcaatatgctaataaattatcgggtgggcaaaagcggattcttgattttgcactcgcacttataggtaaaccccaatgtatatttttagatgaaccgacgagtgccatggatgtacaaatgcgtggccatttttgggaagttgtaacgaagctgaaggacgacggggtaacgatattttacacctcccattatatagaagaagtagagcgtatggctgaccgagtaattgttttggaaaaaggacgtgtgattttaaatgacaatccggaaacgataagaacacgtcaacatacatcaatcattagtttaccaagcaaataccaagacaaagttgaaacgaatttatctagtaagcacttcgaatatacattagagaatcataaaatacggataactacgacagatgtacaaatgatcattgaatatctcatttcgatacatgtcgatttgaatgaaatagagatcaataaagcaagtctgttagaaaccgtatttaataaagaagaggtgaagtagtatgttaacttattacttaaagacagaaattcaattattatttagaaagaaagtgtatttggtgctatctatactggtaccacttgctttatatttattatttacatctatactggatttgcctgaagaagcgaaaaaaccattttataaagaatatatgtatagtatgacggcatttagtttatcgagtttttgtttaatgcaattcccgatagatttaattaatgaaaagacgacaggttggtataaaaatttaatgcgtacaccactacagtcacatcaatattatatggctaaagtctttaaaatgatgttccaatttattttagccatcttacttatttttattgtcgcacactttatgaaaggtgttgaaatgtcaacttcagattggttactttccggtttaatattatggattggggcgagtacttttttatctgttggggtattgatatcacaaatcaatgaaattcaaaaagcaagtagtattggtaatattttgtatttaagtttagctattcttggcggtctatggtttcctgtaagtcaatttcctgaatggatgcgcaagattgcttatgtcacaccgacttaccatttgaagcaagtcgcttatgaaattggtaaaggagggacgctagactatttatcactttttgttttagttggttatagtatactctttttagtagttgcacttattattcaaaagagaagagacgtggatatatgattaaaagattgaaagtcaatgtaattgatttatcgagtttagtatatctcatatttgcagtgataccattgtttacatttgacttaaaagggccatattggatgtatgttattatatttattatttttacaatttcatatactgctttggccatatttacggaagtgttatcaacgaaaatgatatatacttttctaattttacattatattggtatcacttatttagtttatagtgtcgggccagcgacgagtttattctttttctttagttcatttattttaccatatgtattgaaagtgaaaatgaaatctatagcctttttaattttcattgttgtcatgcttattaattttattttaatttatgtcgcagatccgctaagtttaggctttatagcagtcatgcatatcgctatattacttataacggttggaaacttcaaacagagtgaaacaataaaaatgaaaaatgcactggaagaaaagaataagcatatcaatgtactcattgccgaacaagaacgaaatcgcattggacaagacttacatgatacgttaggtcatgtttttgcaagtttaagcataaaatcagaactagcaatcaaactgattgatagcgattcagaaaaagcaaaattacaaatgattgaagttaacaatatatctaaggaatcattaaataaagttcgcagtatcgtcaatgatttgaaaatacagtcatttgaagaagaagtagcttcgatggaaacgttgttaaaaaatgcaaatttaaattttgaattttttaatgccgaactagcaaaaggtattagtccagctaaacaagctattttggcgatgattttgagagaggcaattaataatgtgttgaaacatgctcatgcaacatcggtaactggttcattaacagagacacaaaatgatattacattgactattattgacaatgggattggtatggatgatttaaaagagcatgatttgaagagtattaaagaacgtgtagcccttatgaatggatcgattgaaatacaatcgaatcatggcttatgtatatccattaaaatatctcgaggtgacgcatgatgataaatatcatactagcagaagatcaaacgatgttaagagaagcaatggttcagcttattaatttaaatgaacagttagaagtagttggaagttcaggtaacggaaaagaagcgtatgaattaattaaagtaagacaaccacaggttgctatcttagatattgaaatgcctggcatgacaggtttagaaatattgagaaatattaaagaacaacaacttgatgtgaaagtaattatagttacaacattcaagagacccggttattttgaatcagcggtagcaaacgatgtagatgcttatgtattgaaagaacgctctatagatgaattagtcacaacgatttataaagtattgaataacgaaaaagaatatagtgaagcactgatgacgtcgctatttaaagaaaaaaatccattaacacctaaagaacaattggttttaagagagataggtgagggccatacgagtaaagagatttccaagcatctctttttatcttatggaacaattagaaattatacatctacgattattgataaacttgatgccgaaaatcgatttgaagcatggaatattgctagaaataaaggatggatttaaatgatttagcacttgctaaatatgttgtatggttcaaattaaataataaaactgccgataagtctataacggcagtttttattatttacgtttatttttggatgcgatagattggataatgaaaatgataaatccgattaatatgcctaataaaactgctacaacggcagaaaccattagcggtagttgaaattggttttgtaagattagacctacgatgacggcaatgacaactgcaataatcgttatcatgttttctttgaaaatgctcaatttgttcactcctattcaagattattatagcacgagttatttacatagataaacaatatcatgttatttaaaacatcagctaatttatgagttagtgtataatgtggtcttgacgatagtttgctttttctatatgataatttggaatatttaaaagaagtgggtgcaacagtgaaatctaagaaaaaaatgactagtttagtcgttatcgtagtagtgttaggtgtattagcttttcaatatattaatcaaacaggaccatttcaaaataatggtgcagatacgtcaacaggaccacatgattctgaaaaagttcatgtgtcacgtgttgtagatggagatacattcgttgctgaaaatgacaataatgagcaattgaaagttagactgattggcgttgatacgcccgaaacagttaaacccaatacgccggtacaaccttatgggaaagaggcttctgattatactaaaaagcatttaacaaataaagacgtgtatttagagtacgataaagaaaaagaagaccgatacggtagaacattagcttatgtttggcttgatgataagacaatgtataatgagcaattagtcagacaaggcttagctagagaaaaatattattctccaaatggaaaatatagagaagcctttgaaaagtctgaagacgttgctaaagagaaaaaattaaatatttggagttaaactttgaatttataatattatatttttcataacgtattggcaggaatttgggccgactcctgtggaaaagcactggccgaagactacaggctaaggctgtgtccacggaaagcgtgcacaaaaaactgcccacaaagacggaggctttagctaaagtttgaagagtctgagacatctatttttgtcccagactcttctttcctatatagtatattaatttaataaaaacgtgctactaatttatcatattgctctttagtcaatgcctgatctgttgattgaacagtatctccaataatttgttgtaaggaagatttagatgagactgtttcaacgtaatcacctcttgtagacgggccgtcaataatatttacgctaccatcagtgaaataaacaagtccaatattcttgatttgttgattgagtttctcatatatcttagcctctaaagcctgtgtattgatagatgattgttcaaaaggatcataattataaaaatcataggttacagaattatttttaatacgttcaatgaatgtatacgttgtcgaacgtgttgattgaaactgactatgaaattgattagcaatataacgtcctacagtttggtctatattatcattcactttagattcattgctgtttgttgtatctgcagtgaaatgataaaatgttttttgcttccaatttttaacattgatattaaaaatgcctttttctgtaattacaacataatcgaaagttctagcgtactcaaaaaggggatgttttacagctaagttaccagtagctataatatcaaaatgttgaatgacaccttcgtttttatattgatttaagatactatttaaatcttgcttcgcttttcttaaaccatgatggtgcgtatcattgtttccatctatattcagcatttgattttttaattgtgtattttctcgagttactgtacttatttttgtaactaattgatcttttgaatacgtttcagtttcaagtttattttgcattactcgatggtcaattattacaataacaattaatagtattataattacaattaatattaacgggaaaaacatatgtatcatcctaatcttatttaattttttattatatcttattttacgcttttatttagtttagcacaaattctataattttaaattagtatattagtgctatgacaatagaaagaccattacttacaaaagcaatattttgatgtaatattactaaattaattttattggttctttaaaactgttgtggaatttgtataattcaagtcattaaacagttataatgaattacgcacaatatctttcaatgaagaaggtgaatagcaagttgagcaatataaaacaatattttgaacatatcatagaaacgatccagtgggacgatattattgcatttgataatcatccgtttgcttataaaatgatagatgaactatataaagcaaatataaaaatatcagtaataagttattctacagatattataaggtatgtatcaaaatatacagattttaatataatcattccaaatggtatggttgatagtgctagtcatgtgatactaggcaaaggtgtattagaaaccttttcaaaataccaaattcgcttttattttgtttcagcaccttttatgaatgaagataagttatatcaaaccgtacctgcaatagcagaaatacaaaatacgataaagaactgtactcatagtgtgctcctaatgaatagaccagatcctattattggagattcaaatgggcaatacatagaaattggtgatttttaaaattatttgtgctttatttcacatttttgcgcttaatgcattgaaaaatgcgcatacaaattatataatatgtattattggaaacgcttacttttataggaggtgcacttttggataatgaaaataatgaaaaagttaaagacattgtaaaatctttaaatgaaaatgtacctaacttatttaaatttaatggtgaagttgccaaacaactatttttacgtgacgaatttaacctgaatggtaaagttgatatcagcgttgaaagaaaatttttaggtgaggtcttaaaatatattcctaatgacaatcgtaaggtgctccacgataccaatcacgcatcatctaattatgacgaattaaatttcgaaaatattacacatgcagaaatatttgatggtgaaaaattaattatgactatcattgtctatgatgttgaagatgaagaatggatgtttagatggaatcataatattcgattgccagaaaaaaatatttattttcactctattaaatgggatgtagactatattaagccagaaatcgttttaatgtatgaattattagatcctattgattatcatcaattaccaaattatagaattgttatagattcattgagttattatcaatttgtaatactacgtttagtagtgggcgatgaaagaattaatcaagtgcttatatcagagaaaaaagccatataaaatccttcaaatcattggaaagtttaaccaacagatacaatgaatttgaaggatttttgtttggcttgatttatgaaatattatttaaagcgagtttgaatttgtatgacttcaatcatatcattaaaactactttaagtatcttttgatttatataacgataataaaagctacttaagattttaaacatatgccattataacaatattcataagtggatttgactgctttatcggcatcagagacatgtataccaaacatgattgatatctctgatgccccttgattcatcatttttaaattgatattcgattcagctaacgcgtgcgtaattgtatttgcagtaccgacaattctatgcataccttcaccaacaatcattaagatagctaaatcatgttccacacttaactcatcaacatcgcaattttttcgaatgtcatttaagacttgttcttctctattttggatttctttggagcgcataataatactaatattatctatacctgatggcatatgatcaaatgaaataccataatcctctaagacagctaatatttttcttgtaaaaccaacttgtctattcattaaatattttttaatgtttaaaactgtaaaccctttatcacaactaataccactgacaatgttattagaatttatttctctatcatggcgaatatatgtaccaatatcatcaggtctatttgtattttttatgacaactggaattctatctttgtgtaaaggttgtaaagcttcatcgtgaaacactccaaatccagcataagaaagttcacgcatttctcgataggtaatttcatcgatgacttcaggatttttaacaatcgtaggatttgctctaaaaataccagagacatcagtgaaattttcatataagtctgcccgtacacctctagctactatagcacctgtgatgtcagagccacctcttggaaatgtaacaatataattttgtcgtgaaaccccaaagaatccaggaattatgagtttttcattatattcacgtaatttatatagcgtattataagattgctctaagatttgtgcattttgtggtaaatcagtaacttgaatgcctgcctcaccaggagatacatatcttgtaggaataccttggctattgttatattctgcaatgagttgcgcattaaaatcttctccacaggatagtaatgcgtctaataaacgagaaggtttatcttttaatgtagcaatgtatgactctaatgtttcatcaattgaagttagtaaatgataatccatgtttaattcatctatgatatctgcgtatctttgaatgatttctttctttttagacgtgtaatctaatctatcaatcactttttcatacaaacgaattagtaagtccgttgtttttacatcttcgctgtgacgtttacccggtgctgatacgatgataattttccgatcaacatctgaatttacgatatttaatacttttttaatctgttctgcattagaaacagaacttcctccaaatttagctactttcattgtaaataccaacctttctaaaaaatcagaaaattttgtttagtttttatcacgggagtgataggatagatatacgattaaatattgaacctttacaaaaataatgaatgaatttatactataccatattcaagtatttttcaactgtacaattgtatttttaagaagaacaacggaggaatgaagttatgagagaattaaacgtagccttacttggtttaggaactgtaggttctggtgtagttaaaattatagaagagaatagagaacaaattaaagaaacaatgaataaagatatcaatattcgacacattttagttagagataaatcaagacaaagaccaataaatgtgtcgagttatcatttaacagaagatattgatgaaatattaaatgatgattcaattgatatcattgtagaagttatgggtggtattgaaccaactgtggattggctaaaacgtgcattaagtcagaagaaacacgtcgtaacagcaaataaagacttattagcagtccatttaaatgtattagaagatttagcgcaagaaaatgatgttgcgttgaaatatgaagcaagtgttgcaggtggtattcctattgtaaatgctataaataatgggttgaatgcaaataacattagcaaatttatgggcatactgaatggtacgtctaattttattttaagtaaaatgactaaagagcaaacaagttttgaagctgccttagacgaggctaaagcattaggttttgcagaagcagatcctacagatgatgtagaaggtattgatgcggcaagaaaagtggtcattacttcttatttatcatttaaccaggttattaatttaaatgatgtcgatagacgtggtatcagtgatgttgaatctgaagacattcaagttgcagatcaattaggttacaaaattaaattaatcggtaaaggaacatatgaaaatggacaggtacaagcttcagttgcaccgacgttcattaataaagcgcaccaacttgcagcggtagaagatgaatttaatgcaatttatgttattggcgatgctgttggagaaacaatgttttacggaaaaggtgcaggcagtttagcaactggtagtgctgtagtcagtgatttattaaatgtcacattgaattttgaaactaacttgcatacattaccgcctcactttgaattaaaaactgaaaaaaccaaagaactgatggatgaatcagaaactgtttcacttaaagagaaagaaagttattatgttgtagttcaaactgatggtgaagaagtaaataaagttgaaacgttacttaaaggtcaattaccgtttcataaatcattggccgtaactgagcgagatgctcatacggttggtgttgtaattgttggtatagatgaaaatcctgaagcatccatcacagaatctggatatatcgttaagaaaatttatccagtagaaggagtttaataactatgaaaaactggcaaggtttagttgaagaatttaaaacatatttacctgtaaatgaagcaacaccatcactaacattaaatgaaggacatacgccactcatatattgtgaacggatgtctgaaaaattaggcattgaactccatgtgaaatatgaaggtgcgaatcctacaggctcttttaaagacagaggtatggttatggcgatggccaaagccaaagaagaagggaaaaaaatcgtaatctgtgcatcgacaggtaatacgtcagcatctgcagctgcatacgctgctcgagctggcttaaaagcaatcgtagtaattcctgaaggtaagattgcactaggtaaattatcacaagctgttatgtatggcgcagaaattgtttcaatcgaaggtaattttgatgaagcattagaaatcgtgcaagaagttgcaaaaaatggagaaatcgcattagttaattcagtcaatccttatcgacttgaaggtcaaaaaactggcgcatttgaagttattcaacaattgggtggttcggcgcctgatatactctctataccggttggtaatgcaggaaatatttctgcatattggaaaggttttaaagaatatagtgataaaaatggcactcaattgcctaacatgtatggttttcaagcagaaggtgcctctcctatcgttcaaaataaagttgttaaaaatcctgatacagtggcaacagcaattagaattggtaatccagcaagttgggataaagcgacgaatgcactagaagaatcaaatggttatattgatagtgtgacagatgaagaaattttagaagcataccaattaatggctcgcaatgaaggtgtatttagtgaaccagcaagtaatgcatcaattgcaggattgataaaattacatcgcgctggtaaattgcctcaaggcaaaaaagttgttgcagttctaacaggtaatggactgaaagaccctgatacagccatttcactattagataatccaattaaaccattaccaaatgatagacagagtattttagattacatcaaaggggcactatagcatgaaagaagcgttacatttaaaaattccggcatctacagctaacttaggtgtcggatttgattctataggaatggctttaaataaattcttatatttagacgttactgtgaacgatgaagatcaatggtcttttaatcatattggacctaatgtagatgaactgcctaatgatgagagccactacatttaccaaatcgcacaaaaagttgctgaaacatatgaagttgaattgccaaatttaaatgtagaaatgagaagtgaaattcctttagcaagaggattaggttcatctgcttcggctttagtgggtgcattgtatatcgctaactactttggagatattgaactatctaaatatgaactattacaacttgcgacggattttgaagggcatccagataatgtagcgccaacaatttatggtggtcttgtgcttggttattataacggtgatacaaaagttacagatgtctcctacattgatacacctaaagttgatattattataacgataccaagttataaattaaaaacaattgatgcaagaaacgcattacctgatacattttctcatgaaaaggcagttcaaaatagtgcaattagtaatacgatgattagtgcattaattcaacataattatgaattagctggaaaaatgatggaacaagacggtttccatgaaccttatagacaacatttgattccagaatttcaaacaattaaaggtattgcgaaacaacatctagcatacgcaacagtaattagtggtgccggcccaacagtactcacattaatagcacctgaacgaagcggcgaattagtacgtgcactaaagcgtgaatttaaagattgtagatcagaacttgttacaatcaatgaaacaggtgtaacgactaaagtattgtaccaacgttaataatctgttgtaatatagaatatagacgttgaagggaggttagcaacatgggtaagtataaaatggtagtcatggacatggatgacacattgatgaataatgaaaatcaaatgagtccagagacagaatcttatttattagatatacaaaaacaaggatataaagtcgtattagcatctggtagacctactgaaggcatgttaccaactgctaaaaaattaaaatttgatacatatcaaagttatgtaattagctataatggtggtaaaactgtcaatgtgaatactgaaagtgtagaaaaaagtcgaacggtaactaaggaaaatttcgatttaattgtggattattgtcgcaaaaataatttattcattttaacatatgaagatggtcatattgtttacgaaggtgaacatgaatatatgaatatagaatcggaattaactgggttacctatggaacatgtaaatgatttaaaggatttcatccaggatgacgtgcctaaagtaatgggtgtagattatgtatcaactatctcaaaacttaacactgacttagctggtcactttaatgaagatatagatgtgacaacaagtaagccgtatttcttagaatttatggcacagggtgtttctaaaggtaatgcagtaacagatttatctaaaaaattagatattgcattatctgaagtagttgcattcggagatagttcaaacgatatttctatgctgcaagtggtcggtcatgctgttgctatgggcaatgccaatgaccaggtgaaagcagttgctgatgaaattacattgagcaatagtgacaatggcattccacatacattgagacagattttataaaagttaaagcgtttaatgtattaatatcgtttttgtaattatttgtttgtatgcgcactgaaattacgatttgtagtagttattaaaaaagaggttagaactttaaataaaagtcctaacctcttttttaatagatgtatttattttgcagtatgtgtccattcatttttacctcgatgtcgttttacatgtgcatagacatggtctgcagcataatctaggtttgtataaacagtgattgaaaatgcggactgatcctcctcaaatgtttcttctaaaaataggtcttttaaatgttcaaagaggctttccatttgtgaatgctctaaactactgtattctcttagtgtgcgtttgattaagcgttgatgcttttcctcaagtgattgcacaactataacgaaacgttcttcagtctctaatatgtcatcaaataaattcgtttgtccaaccatagtttccacctctaggttaagtcattattatatgttattatactacacttcttgaccagtgaaaatatccttacttctataattaaattgttagcaaattaaaaaacatcggaataaacacataacagtttattccgatgttttaattttaattataatcgtgtctcttcaaatccatctcactgagtttgacgattttagttttcttaataaatttgtgaacgatataaattacaaataaaataatcataggtgctaaatttctaaatagtgcggcaaaatctccagataaagcagcatctaacgagttaccaacaaataagaataataacgctataatgacaataattggtccaaatggataaaacggtgctttgtaaggcaacacttcatttggatctttattttgtttcttaatagcagagcgtaacctaatttgtgataagatactagacgcccaaatcacaataacgagtgatcctataatatttaataacgagaacactatatctgatttgaattgcgctagtattatgatgaacaatacaattacaaatgtagcaattaatgcagtcattggtaattttgtagtcttgtttaatttagataagaacttaggtgcttgtctatcttctgccatagagaataacattctacttgtagtataaatcccagaattagctgctgataataaagaagttaaaataactgcatttattactgaagctgcaaatgcaatgccaacacgatcaaacacaatggtaaaagggctttgagaaaccgattcgtttttattcaataacattgggtctgtataagggataattgctgatataactgcgattgataatacataaaagagtaaaattctccagaaaacttgtctgatagcttttggcattgagcgatcagggttagaagattcgcctgcagtaacagcaacgacttccgtacctccaactgaaaagcctgctaccaagaggacgcctagaaaacctgaaataccaccaacaaatggtgcctcaccagttgtgtaattcgataatccataagttttcccacctaatattcctacaatcgttaatacaccaatgagaataaacacgatgatggttacaactttgatgagagataaccaaaattctgtttcaccgaatgctttaacagaaaatatatttaataagaacagtaagcataagaatataatgctccatgtgacaggactgaaaaattgaaaagcatcccagtaataaagtacacttgaagaaataataatatcaacgctcgttacaagtagccatattgcccaatatagccaccccatggtaaatcctaatgatttatctacaaaccttgtagaataagaactaaacgatccagaaacaggatagaaagttgctagctccccgattgatgacattaagaaatacaacataattccaataattaaataagctaatatagcgccaccaggtcctgcttgagaaatgacattcccagttgcaacaaaaagtccagtaccaatggcaccaccaattgcaatcattgaaatatgacgagaatttagaccgcgattcatattgttttgtgccataaaaagtctcctatattcgattgaaattttatatatacaatacattttaatgcttttactgaatacaagcaatgctttttgtgagtaataattacaaaatgtttaaatattgcgaaaattgtcattaaaattagtgagccaatgtttgcttttacgtggaggatacattaaaataaatactagataataattattattatctagatgaagtaagggggaagtaaaatgagcaataataaaaaattgacaagccttttcggtgcgccagtctcagatagagagaacagtatgacagcgggtccaagaggaccgttattaatgcaagattggtactttttagaacaaatggcacacttcgatagagaagtgattccggagcgccgtatgcacgctaagggttcaggtgcttttggtacttttacggtaacaaatgatattacacaatatacttcagcaagtatattctctgaagtaggtaaacaaacagaaatgttcgcacgtttttcaacagtagctggtgaacgtggtgcagctgatgcagaacgtgatattcgtggttttgcattgaaattctatacggatgaaggtaactgggacttagttggtaataacacaccagtattcttctttagagatccgaaattattcgcaagtttaaaccacgcagttaaacgagatcctagaacaaatatgcgtagtgctcaaaacaattgggacttttggacatcattaccagaagctttacatcaagtaacaatcttgatgacagatcgtggtattccaaaaggctttagaaatatgcatggctttggttcacatacgtactcaatgtacaatgataaaggtgaacgtgtttgggttaaattccatcatagaacacaacaaggtattgaaaacttacaaccggatgaagcggcacgaacaattgcagaagatagagaatcttcacaaagagatttattcgaagcaattgaaaataaagattatccaaaatggaaaacgtatatccaagtaatgactgaagaacaagcaagaaatcataaagataatccttttgacttaactaaagtatggtataaaggcgactatccactaatcgaagttggagaatgggaacttaatcgcaatccagataactatttccaagatgtagaacaagcagcatttgcaccaactaacattgtacctggtattgacttctctccagatagaatgttacaaggacgtttattctcatatggtgatgcacaacgttatagattaggtgtgaaccattggcaaattccagtaaaccaacctaaaggtgtagggattgaaaatatctgtccatttagtagagatggtcaaatgagaattctggataacaatcaaggtggtagtacgcactattatccaaacagtgaaggtgcatttgaagatcaacctgaatttaaaaaacctggattaaaagtagaaggcgaagcttacgaatatgatttccgtgaagatgacgataactacttcgaacagccaggacgtttattcagattacaatctaaagaacagcaagagcgtatttttgaaaatacagcgaatgaaatgcaaggtacaacattagaagtacaacaccgtcatattcgtcattgttataaagcggatagtgaatatggtaaaggtgtagctaaagcattaggcattgacattaatgatgttgatcttgaagttaaagactaatttaacacaatttaataataaaataagcacaagttgaataaacatcatatttaaagccaacgaaatttatttcgctggcttttttgaggtgaggcttaattttattaacaaaagtaggatgactaggattgaaaagttttcagagctgaagcgcatgtataagtctactagcatttttatgcataagaactactaattttcataaatagaagtagtagttctttaaagcagtgggactttacattttctattcagtcatctactgcctaaacgaaaaagagtctgagacatctatttttgtcccagactctattgttcaaaactcagaacattagactaatatgctgctttttaaattaaaaaaacaacatatattacaaattccaatttttaaatgtcgtatttaaaagataagtaatgaaatgtactacttagtttcacgatgtaacgtatatttatttaatcttggacaaaactttttaagttcaatacgttcaggatgattacgtttgttttttgtagaaatataattacgatcgccacattcagtacatgctaatgtaatatttacgcgcaaagttaacacctctttccaaatagtaatgattacgttttataatattaccatataaaatttaatctttcaacattttaataatgtgcaatttgaagaattacattaaaatacatatccactaaaaattaattaaagattaaagattgaatagatagaaaaatatgttatgatataaaacgtaataattacgatttgtaaaagggagaggaaaatagatggcaaaaaaatctaaaatagcaaaagagcagaaaagagaaaagttggttgcacagtattacgaattgagaaaagagctaaaagataagagcgattatgaagctttaagaaaattgccaagagatagttctcctacgagattaacaagaagatgtaaagtaactggcagacctagaggtgtttatcgtaaatttggtatgtcacgcattgcattaagagattatgcacataaagggcaaattccaggagtgaaaaaatctagttggtaatttacgactaaagtcagtttacatttgatataaaacaatgtatattatctattggaaaagataaataaaaaagttattgttcggaaaaatgataaaattatcaattatttcaatgataatgctcattaacatcatgaaaatcttaccattatataaaagttttattaaaaatgttaggggtttgttaaaatgaaaatttttgattatgaagatatacaacttgtaccaaataaatgtattgtaaacagtcgttcggaatgtgatacaacaattcaatttggacctagaagttttaaactacctgtagtaccggcaaatatgcaaacagtaatgaatgaaacattagcggaatggttcgctgagaatgattatttctatattatgcatagatttgatgaagaaggtcgtattccttttattaaaaagatgcaagaaaaaggtttatttgcttcaatttcagttggtgttaaagaacgcgaatttggttttgttgaatcattagctgctgaaaacgtgattcctgagtatattacgattgatatcgctcatggacattctgattcagttatcaatatgattaaacatattaaaaaacatattccagaagtatttgtaattgctggaaatgtaggtacaccagaaggcgtacgtgaattagaaaatgcaggcgctgatgcaacaaaagtaggtattggaccaggtagagtatgtattactaaaattaaaactggatttggtacaggtggttggcaattatctgctttaaatcattgtagtaaagcagcgcgtaaaccaataatagcagatggtggtattagaacacatggtgatattgcaaaatcaattcgttttggtgcatcaatggttatggtaggatcattatttgctgcacatgaagaatcaccaggtgaaacagtggaattagatggcaaaatgtataaagaatattttggtagcgcatctgaattccaaaaaggtgaacataaaaacgttgaaggtaaaaaaatgtttgttgaacataaaggctcactttttaatactttaactgaaatgcaacaagatttacaaagttcaatttcatatgcaggtggcaaagacttaaattcattaagaaaagtagattacgttatcgtaagaaactcaatttttaatggtgatagagaccaaaatttatagtaggtgtttaaaatcagaagacttttattatatatagtcatttttttgatcattgtattagtcgtccctatcaaagaaacggcacctatgacatcgttacagcagcaactcaaatcgagtgttgatagttggacttcaagcgaaacagcaacgaacgatgaactgaaagtacctaataaacaagattttgctgtgaataatattcaaatgaatatgtcaaaacaggacgtcgataacaaacttggcaaagctaaacgagtgacatcaaatgaatatggcacacagtggcatacgtattattctgatgattatagagcatttgtaatggtaagttatattgatgatagagtgaatgcactttatagtaatcaaaatctaatttcttctaaatcgaaaattaaatacggtacacctaaacaaattgtgcgagatagacttggcgaaccaattaaagataaacaaaaaggtaacgtaaaatttgatgttcaagacgatgaatatgataattttcataaagacagcatttatacaacggcattttatgataaacatgagaacaataacttaactgcgcttttacaggttagtgacaaaatggaaaatcgtttacaacaacaatatggtgcaccttctgataatttagcccaaagtttcgaactacaaaactttgatttagtaaatgctgaaagggttcaacataatttaaatacattaagctattcatctagtatttcagatactgccagaaaacacagtaaagatatggctgataataactattttgatcataacaatttatcaggagaatctccttttgatagattggaggcagatggtcatgatttcaatgcagcaggagaaaatttagcatatggtcaagcaagtagtatttatgcacaccaaggtttaatgaattcattaggtcatagaaaaaatatacttaaaaaagaatttaatactcttggtgtgggtgtcgattttaataaaaataggcaaccttactggacagaaaattatacaggctaatgttttattatagttgtatacgggtatccatgatttgtgaggatggataagttatgacaacaaataaaaaagataaaacagaagatatacttgaaaaagttaaagaagttttagaaaagaatagaaaaaaataggcgaatgcgcaattgcgcattcgcttatttttttgagagtgtcttaaattgctctaaattaccaattacatttctctaaataatccgaccacttttcctaagacagtaacttgatctaaataaatagggtccattgaactattttctggttgtagacggtaatgtgctttttccttaaagaagcgtttgactgtagcttcattttcttcagtcatagcgacaataatatcaccattttcggcaattgtttggcttctaacaatgactttgtctccatcaagaatacctgcttcaatcatactatttccaactacatttaaaataaaaatatcactattgtgtgtagatgtgaaatgttctggtaaagggaagtactcttcaacattttcaacagcagttattggtatacctgctgttactttgccaattacaggaacatgaattgtttcttccatattaataggttcacctaattgttcagttactatttcaatggcacgtggtttagtaggatctcttctaatataacctttttcttctaatctagataaatgaccatgaactgttgagctagatgcgagaccaacagcttcaccgatttctctaacacttggtgggtatcctttagcgtgaacagtttgttttatatattcaaaaatctcattttgtcgtttagttaactctctcataataggcactccctaatctaatttaacctaattatagcatgtgtatatccgttttacaaacgtttgttcgtttcggtgttgacatagaacaaatgttctgataaagtaactatacaaacaaacgttctaggagtgactataaatgataaaaatatataaatctcaaataaaagcttatacaatggtgttaattgcaactatggttctttgcgcaatttttatattaagtgcttataacaacgctaattcagaacagacgtacgaaatgacagatcaccaaatgacgcaacaatctaacaatagcgaacaaaacaatactaaattggagcagaaaagcgaacaagattcacaacccgtaatggcatcaatgtattaaaatatatataaaagacaatgattaatgatgataataaggttgggttaaggtgagcgaaacaatttagtttcgttcacttttttgttatattttttatattaataataacggaggtttataatgtctcaaaaagatggtgtagatataaaaagaattaatgaattagcaaaaaagaaaacggaacaaggacttacagaaaatgaagctaaagaacaatcgaaattgcgaaaagcttatctagaatcttttagaaaaaactttaaacaacaaattgaaagtacaagagtcattgatcctgaaggtaatgatgtcactccggataaagtgaagaaaattttagatgcgaaagagaaagaagataaatagaaaatcaatattttgttaaatagatattaaataaggtataatgatatagaatcttgttagaagaaaggaagtcatttagatgaataaagaaaaagatcaattagcggttgatacgattagagcattgagtatcgatgctgttgaacaagccaattcaggacaccctggattaccaatgggtgctgctccaatggcatatacactatggacacgccatttaaattttaacccccaatcaaaagatttctttgatagagatcgctttgtattatctgctggacatggttctgctttattatatagtttattacatgtttcaggtagtttagaattagaagagttaaaacaatttagacaatggggttctaaaacaccaggacacccagaatttaaacatacagatggaattgaagtaacaactggtccacttggacaaggttttgctatgtctgtaggtatggcgatggctgaaaaacacttagctggtaaatttaataaagaaaatgctaacgttgttgatcattacacatatgttcttgcttctgacggtgacttaatggaaggtatttctcatgaagcagcttctttagcaggtcataatcaattagataaattaatcgttttatatgattcaaatgatatctcgttagatggagatttagataaagcattctctgaagatgtaaaaggtcgtttcgaagcttacggttggaaacacattttagttaaagatggcaatgatttagatgcaattgataaagctattgaagaagctaaatcacaagatgttccaacaattatagaaattaaaactgtaatcggtttcggtgcgcctaataaagaaggttctcacggtgtgcacggtgcgccacttggagaagatgaaagaaaattagcgttagaaaactatggtttagatccagaaaaacgctttaatgtaccagaagaagtttatgaaatcttccaacaaagcatgttaaaacgtgcaaatgaaaaagaagaagcatggaataaacttgtagaaacttacagtaaagattatcctgagcttgcagaagaatttaaattagcaatcagtggtaaattgcctgtcaattatagtgaagcattacctcattttgaagctggacacagtggcgcgtcacgtgcagactcaggtgaagtgattcaagcattaagtaaaacagtgccttcattctttggtggatcagcagatttagctggttcaaataaatcaaatgttaaagatgcacctgatttcgataaagaaacaccagaaggtaaaaatatttggtttggtgtacgtgaatttgcaatgggtgccgctgtaaatggtatggctgctcacggcggattacatccatatggcgcaacattctttgtatttagcgactacttaaaaccagcattacgcttatcatcaattatgggtctaaattcaacatttatctttacacatgactcaatcgctgttggtgaagatggtccaactcatgaaccaatcgaacaattagctggtttacgtgcaattccaaatatgaacgtcattcgtccagcagatggtaacgaaacacgtgttgcttgggaagttgctttagaatcagaaggcacaccaacttcattagtattaacacgtcaaaatcttacaactatggatctttctaaagaaactgtagaagaaggtgttcgtaaaggtgcttatgtagtatttgaatcagataaagcaccagaattcttactattagctactggttctgaagttaacttagctatagaagctgctaaagatttagaagctcaaggtaaaggtgtacgtgttgtttctatgccaaactggaacgcttttgaccaacaaactgatgaatataaagaatctgtattaccattatcaattactaaacgtgttgctattgaaatggcatcaccacttggttggcacaaatatgtaggtacagaaggtaaagtaattggtatcgacggatttggtgctagtgctcctggagacttagttgttgaaaaatatggctttactaaagaaaatgtattaaatcaaattcaaacattttaattagtgtagtgaaaattgattttgttggtatgagaacttaagttctcataccattttttattttataattaaaataagcttatatttacaaattgattttgaaattgatataatacatgaatcgataatttatataaatagagttgctcttgaaaatgagcactaattttagtaaaattcattaggataggaaagtgggtgaaacaatggcaacttggttagcaatcgtattaatcgtgttagcattaattttaggtttagtaggtggatttttccttgcaagaaaatatatgatggattatcttaaaaagaacccaccaatcaatgaagaaatgctacgaatgatgatgatgcaaatgggtcaaaaaccttctcaaaagaaaataaatcaaatgatgacaatgatgaataaaaatcaacaagatcaattgaaaaaatctaaatagaacatcattaaagggctgggagctacttgtaaaaagtaactttcagcccttattttttgctctggcaacacagtggcaaaatgactatgaatttttaaatcacatttataaatacattgtttagtatttcataacttctttttcattattcgggtacaaaattatgaattaaaagcatttggaatgtttttgaaaataataatttcagatgatgaaaatataccttttcttaatactacaaatgtagataataaaggttatgaaagtgcatcaaaaaatcaaaggaagtggttgctcgatggtaacactcaattcccaaattcgattcaagttgcaaaggttaacttcacagctgtaactgatgaaaaagataaaattcactacccaacagatagtgtaagtcaaaagttataagatgaatatatgaatgaggatattgagaattttaaaaataagttatataacattctttttgaaaaataagaatacaataatcaatttacaatatattcttataggtaatttatagaatgaatacgtaattagtgtaggagagtataacaataaaaattcgagtattcagaaaaataattgattatagattgtaatttgttataatatgaatataagggaggtagtaataagtgaaggatgcttatgccatggaagataaagaagtacttgatcgactagcaaatatgcatattaactttccgaccgacgaagcatttaagaaatatcataacgcgatgcaattacatgatatgaattatcttagatacactttaaacgatgcattgtccgcatgtacacaaacaaatgcaatataaataaacatgtagtaaaatcagcttaaatataagctggttttattttgtgtatattgtgaataaacatttgactatgtcgttttctacataactaaaagacatgatatgaacattaagccttaaattttgaagattaaataataaattaggctataaatactgattattaatttattaagtgatatactatccaaggtaaatatcatcttgtagaaacacaaagaaggtgtaagcatgttgtatttagtattttcaatagttttcgcatttttaatgggtattggtgtcattatagtcagaatgaaagcacaacaatttcccgtaaatgaaaagaaaattatactacctccattttttatggcaacaggtgcattgatgtacgtggtaccttattttagattaactggaactgagattttagaatgtatcattatggggttattattttctaccatattaatttggacatctagattcgaaacacagggtagtgaaatttacatgaaacgttcaaaagcgtttccaattattcttatatcattgttgttaattcgtacagtaatcaaaatatttataagtaaccaaattgatccaggggaaattgcaggtatgtttttcttattagcattttgcatgattgtaccttggagaatagcaatgttatataaattcaaaaaagttaaaagtaatttaattcaataaattattgccgtttatctataaaggtaaacggctcttttaatatacttgaagcgttatgaaaaatataataaactattaatacgaacaaacgttctaagagagggcgatataatgaaaatcatacatactgcggattggcatttagggcgaatattaaatgggaagtcgttactagaagaccaagcgtatatactagataaatttattgaggcaatgaaattagaacaacccgacgttattgtcattgcgggtgatctatatgacacaagttatccaaataaagatgcgattcaattacttgaacagacaattgatatattaaatttagaaatgagtattcctttaattatgattaatggtaaccatgatagtaaggaaagattaaattatggctcaaaatggtttgaaaaatcacatatgtacatacgtactgaccttaatgatatgaataaaccagtaacgattgggaacgttgatttttacacaatgccttttgccactataaatgaaatgcaatatttctttgatgacaaagctatagaaacacaccaacaggctttaaacagagtgttggcatatatgcatgaagtcatagatgagaataaagtgaatatttttgttggtcatttaacagtacaaggtggaattcgctctgaatctgaaaggccgttgactataggtacagttgagtcagttgatgagaatctatttaatcagtttgatagagttatgcttggacatttacatcatcctttcagtattgaatctaattttataaattacagtggttcattgttacaatattcattttcagaaacgaaacaaccaaaaggttataaaatagtagaaattaaaaatcaaaaaataacagacaaatttataccattaaagcctctaagacaattagaagtgattgaaggtaattatgaagatgcaatacaagaaaagttagaagtaaaacataaagaaaattatttacattttaaattaaagcatatgtcacatgtgagtgatcctatgatgcatttgaagcaaatttatcctaatactttagcgttaaccaatcagacgtttgattttaatacatctatacaccatgaaaatattgaaattcaaaaattagatgatgaaacaataattgataatttttataatagtataacgggtgaacatttaactacgaatcaaagtaaaaaaatagaaaaaattatgacagcattacttgaggagggttctaaataaatgagacccattaaactgaatttaactaatttcggtccctttttaaatgaaacaattgattttaataatgtagaaaataaccaactctttttaatcagtggaaaaactggttcaggcaagacgatgatatttgatgctattgtgtttgcattatttggtgaagcttccacaaaagatagaaaagaaagcgatttaaggagtcattttgctgaaagtaaaaaaccaatggttgtcgaatttgaatttaaattaagaaatcaatattttaaaattcaaagacaaggtgcatttataaaggaaggtaataaaaataaaacactagggcaactagcagtttatcaatatgaacaagatgattatgcacttagagaaagtaaaattaatagtggtaatcaatttatcaaagcgctactaggtgtgaatgctgaacaatttcgacaactgtttatattaccacagggtgaatttaaacgatttttactctcgaaaagtgtggaaaaacaagatatattaagaacactgtttaacagtcagagatttgaagaaattcaaaaaaaattatctgatgatgtaaaagaagtaagagagcaaatagaaaaaaggtacaacgatttagaaaatcattggaaagaattggaaacttttgatgatgaaacattatgcgagcataaagtaataagtgctagacaaacgaacaatatcattaaggtattaccagattttaaaatgaaagcacaaataatacgagatgactttgaacagaaaaaagaaatattaaaaaataaagtcaacagtacagaaaatgctttaaataataatattaaattagaggatgctttaaataagctcaatgaaaatcaacaaaaatatgaagcattattagttaatgaacacgaaatccaagaaaaagttaagcgtgtaacagaaatcaacgaagtaagacccattacgaatttattagaagtaaaagaaaatacaatttccaaaaaaggtaaagtagcgcaaagtattgaagaaaaatctaaaagtatctttgatttggaggataagataaaacaaagtaaccttgaagcggataaccttaaagagaagcaagatgatattgaggaactaaggcgttttattgaacagacgcaattgttttttgaaaaagcaaataaatataaagatgcctacaacaattatcagttcacgaaaacagcatttacagatttagaagcgcatttaactcaaaaaaatgaggaaatcaaagatactacagctaaattaaatcaacgtcagcctgattatcgaaagatagaacaaattacggaagcaatatacaaccttaataatgatattaaacaattgaagcaaaatgaaaaagataaaattgagtatgatgcattagagaaaagaaaaatgcaaaagcaacgtaatcttaaagatttaagtcaaaagcgtgtgcaactcaatgaggaatataataatattgataaatctaaattagatttaaacaacaaacaagatgtaattgcaacagtacaagcagctctacatactggtgaaacttgcccaatctgtggtaatgaaattcatacattatcgagtcacgtggattttgatgaaataatggaaagacatcaacagctcacgctattagaagaaaaaatagctactgtaaaaggagatattattaaatgtgaaagtgaattgtcatacattgaggagcaattatcaaaatatactatagcttcattggaaaatataaattatgaagctctagaagatgaagttgagaagaaatatcaagaaaagaaaaaaatagatgaagaaaataatgaaatagaaaaattaaaagaccaattacaacaatatgaaaaaagttcacatgatttacagatgaatattcaaaaaaaagaacacatattaaaagaaaatgaaactgcgataaacgattttgaaaatacaacaggttataaacgggttgatgaatttttaacaaaatttgaagatgcttataatcaaatacgccaatttgatcaaacgctaaatgaaattgaacaaaaaatacaaaattataagagtactttagcaatagaaaaaaatagtgtaacttatttaaaaaataaccttgctgaaatagaaactgaaatcaatgagactgatatgaaaatcaatgaggaaatgcaacgtattggttttacatcaatagaacaagttgaaaaagtaacagcacaagcatcagaaaagcaaaatttagaaaaagaaattgaaactttcaaaaaagagaaacaatcttacgaattatatatagcgcaactaaaagctgaaacaaataataagaagctagatgatacacaacaactaaaagaacgatttgaagaaatgcaacaagtatatgaaacagcttcaactgaattaagtcaacatgactataaaatggagtttaattctaaaaaaataactgaaataaataaaattatagatgagttaaatagtgaattgcaatctcaacaagaagtatttcaattagcagaaattttagcagggaaaaatgaacaaaaattaacgttggaaaattatgtattaatatattacttggagcgtattcttactcaagctaatcagcgcttagcaattatgacgggacagagataccaattaacgagacgagctcaaatatctcaaggctatagtggactagaaatagatgtgttcgatgcacattcaaatcaatcacgccacattacatcgttatctggtggagaaacatttcaggcatcattagcattagcattgggattaagtgaaattgtgcaacaagaatcaggtgggatttcacttgattcaatgtttgtagatgaaggatttggtactttagatcaggaaacactagaaactgcactagatacattgctaagtttaaaatcaacgggtcgcatggttgggattatttctcacgtaagtgaactcaagcaaagaataccgcttatattggaagtaaccacagaacagtatcaaagtacaacacattttaaaaaacaatagagtataaaaaaaatatatttaaataagaaaaaagccaagacattttgaaatgtcttggcttttttgatttaaactagagcgaactatgaaaattttaaaaaagcttaatttttttcgctttatgctaattaaatcgaattaatttttttcacgtaataagtcgcggatttccgttaataatacagtgttttcttcgatttcttcttcctcttctttcttcattaacgtattagcaattttaacgaaaatgaataaagcgaatgcaatgatgatgaaatcaataattgattgaacgaacataccatatttaatacccataaatgaccagctttcagcaaagtcaacagtaccgaaaattaaaccaattaatggcatgataatgtatgaaactaaagcagtaacaattttattaaatgctgcgcccataactacagcaactgctaaatctaaaacattacctttaagtgcaaactctttgaattcctttaacatataattaactcctcttaattaaatttaaaatttattatacattatatgtaaagtttagaaaatagtttatttaatgaaatttgatattaactcattgttttgttattgtaatacgtggctattacataaaatagtagtgtttagaaattctaatcattctaatttagattcgaaaaatttaatatgataagaaagggagtaattaattatgaattcttctagtaaccaacctaatggtaagaaattatctccagtttttatctatagtgcgattatcgtagcgattgttgttattatcggcgcagtgttaccggaacaatttgatcatgttacgaatacaattaaactatggattactgataaactaggatggtattacttaattcttacaacgtttattgtattcttctgtattttcctaatctttagcccgattggtaaattgaagttaggtaaaccgaacgacaaacctgaatttaatacaatttcatggtttgctatgttgttcagtgctggtatgggtattgggcttgtattctatggtgcagcagaaccaatggctgactttgcagcgccgccaaatgcggatccgaaaactgcagcagcttataccgaggccttacgttcaacgtttttccattggggattccatgcatgggcaatttatggcgtagttgcattagcgctcgcttatgcccaatttagaaaaggggaacctggattaatttctagaacattacgtcctatcttaggaaataaagttgaaggcccaattgggacaatcattgatgtgcttgctgtattcgctacagtagtaggtgttgccgtatcactaggtatgggcgcattgcaaatcaatggtgggcttcactatttatttggcataccaaataatgtttgggtacaagcaattattattgtagttgtaactattctatttattatgagtgcttggtctggtttaagtaaaggcatccaatatttaagtaatttaaatattagtttaggtgcaattttaatgattgctgttttaatcattggaccgacagtattgattttaaatatgatgacaagttctacaggtagtttgttgaactcattcttattaaatacgtttgacactgcagctttaaaccctcaaaaacgtgaatggatgtctagttggacactttactattggggttggtggttaagttggagcccattcgtaggtattttcattgcacgtgtatctaaaggacgttctattcgtgaatttattgctggggtacttttagtaccagcgttagtaagtttcgtttggttcagtgtattcggtgtacttggaattgaaactggtaagaaaaatccagaattattcgatatgactgctgaaacacaactctttgctgtgttcaatgaaattccactaggtattatactatctattattgcattagtattaatcgcatcattctttattacctctgctgactcagcaacatttgtattaggtatgcaaacgacaaatggttcattagagccttctattatgattaaagttacatggggtatcgcacaatcattaattgcattcgtattattatttgctggtggaggtaatggtgctgaagcattgaatgcgattcaaagtgccgccatcataagtgccttaccgttctcctttgtagtgatcatgatgatgatttcattctacaaagatgcgaaccaagagcgtaagttcttaggacttactttgacaccaaataaacatagattgcaagattatgtacaacatcaacaagaagattatgaagatgatattattgaaaaacgtacaccattaagagatgcagaaaaagcagaaaaataatattgattaatagtcaaaaactgagaatccaattgggttctcagtttttttgtaggataatgaaattagctgataatgattctcaactgataataataacttattacacctgcatttagcaataagttttgcttatgtatactgattgaaaaatcaaatctaatttagccatgtttctggctctatctagttgttttaaactacatataattatacaatttaactaacggcatatattaaaaaaattcaagggggatttatatggcttctaatattaaacagcaagcgaaaaaatcgtttgacttaaatgggaaatcatacacgtattatgatttaaacactttagaagaacaaggtttaactaaagtagcgaaactgccatattcaattagagtattactagaatctgttttaagacaagaagatggttttgtaattacagatgaacacatcaaagcgttatctgattttactgaaggtgcagaaggagaagttcctttcaaaccttcacgtgtaattctacaagatttcacaggtgtacctgctgtcgtagacttagcttcattacgtaaagccatgaatgatgtaggtggcgacttaaataagatcaatccagaagtgcctgttgatttagttatcgaccactcagtacaagtagatagctatgctaatccagaagcgctagaacgaaatatgaaattagagtttgaaagaaactatgaacgttaccagttcttaaattgggcaactaaagcatttaataattatagtgctgttccaccagcaacgggtatcgtacaccaagttaacttagagtacctagctaacgttgtacatgcacgtgaagttgatggtgaaactgttgcattcccagatacattagttggtaccgattcacatacgacaatgattaacggtcttggcgtattaggttggggtgtcggtggtattgaagccgaagctggtatgttaggtcaaccttcatacttcccaattcctgaagttattggtgttagactatcaaatgctttaccacaaggtgctactgcaacggacttagcattacgtgtaacacaagagttacgtaaaaaaggcgttgtaggcaaatttgttgagttcttcggtccaggtgtacaacatttaccattagctgaccgtgcaacaattgctaatatggctcctgaatacggtgctacttgtggtttcttcccagtagatgaagaagcattaaaatatatgcgtttaacaggtcgttctgaagaacaaattgacttagttaaaacatatttagaagaaaatagcatgttctttactgtagaaaaagaagatcctgagtacacagatgttgtagaacttgatttagctactgttgaagcttcattatcaggtcctaaacgtccacaagatttaatcttcttgagtgacatgaaaaaagaattcgaaaaatcagtaactgcaccagcgggtaaccaaggtcatggttttgataagagtgaatttgataaaactgcaacaattgaatttaaagatggcacttcaacaactatgaagacgggtgatttagcgatcgctgcgattacttcatgtacgaatacatctaacccatatgttatgttaggtgctggacttgttgctaaaaaagcagttgaaaaaggtcttaaagtacctgaatatgttaaaacatcattagctccaggttcaaaagttgttactggttatttaagagattctggtttaaatgaatatcttgatgacttaggattcaaccttgttggttatggttgtacaacatgtatcggtaactctggtccattattagaagaaattgaaaaagcgattgctgaagaagatttacttgttacttctgttttatcaggtaaccgtaactttgaaggtcgtattcatccattagttaaagctaactatttagcatcaccacaattagtggttgcttatgctttagctggtacagtagatattgacttacaaaatgaaccacttggtaaaggtaaagatggcgaagatgtatatctaaaagatatttggccatcaatcaaagaagtttcagacacagttgatactgttgttacaccagatttatttaaagaagagtacgaaactgtatataacaataacgaaatgtggaatgaaattgatgtaacggatcaacctttatatgattttgatccagaatcaacttatatccaaaatccttcatttttccaaggtttatctaaagaaccaggaacaattgattcattaaataatttacgagtaatgggtaaatttggtgattctgtaacgacagaccatatttctccagcaggtgcgattggtaaagatacaccagcaggtaaatatttaattgaacatggcgtgccaattcgtcaatttaactcatatggttctcgtcgtggtaaccatgaagttatggtgcgtggtacatttgcgaatattcgtattaaaaaccaacttgcacctggtattgaaggtggctatactacttactggcctacaggtgaacaaatgtctatatttgatgcagctatgaaatataaagaaaacggtactggattagttgtattagcaggtaacgactacggtatgggttcttcacgtgactgggcagccaaaggtacaaacttattaggcgttaaaacagttattgcgcagagttacgaacgtattcaccgttcaaacttagtaatgatgggcgtattgccgctacaattccaagagggcgaatcagctgatagtttaggtatcgatggtactgaagttatctctgtagacattgatgaaaatgttaagccacacgacttagttaaagtccaagctaaaaaagacaatggtgaggtaattgaatttaaagctattgctcgtttcgactcaaatgtagaaatggattactatcgtcatggtggtatcttacaacttgtattaagaaataagctagctggacaacaataaaaaaacaaacctgtataattagtatactgatggactggccatatgctagtccatcttttttatgttaatatttaaggtatgatatgtatcagtagaaatattgaaaagaggatgcaaaaatgatttacagtatgacacaaattgaagcacgttattcagaaactgatcaaatgggtgtaatctatcatggtaattatcctacgtggtttgaagtagcaagaacagattatatttctaaactaggttttagttataaggatatggaagatagtggtattatttcgccagtaatcgatttagatatcaagtatattaaatcgatcttttatccggaaaaagtaacaataaaaacatgggttgaaagatattcacgtttgcgatccatatataaatatgaaatctataatgaagcaggggaacttgcaacaacaggttcaacggcattgacttgtataaaaaaagaagatttcaaaccaattagattagataaatatttccctgagtggcatgcaacttatagtgaagttgataaaagaaacaaggctggagagtgcttagaggtcataaacggcttataaaacgaagtggttaatatctatatctatatataataaaaagcgtctgacacttgagccaggcgctttttattatataggttattttgtagcatatgaaatttcatcaatgccatcatttacgtcaataaataaattatggtcttcaaaataccataaatctttttcagcaattacgacatctaaaccgtcgtaatgattttcataaccaatttcaacatcctcttttttgtcaacgctaaatgcaggactgaatccttgttttaattggaattcgccaccataacgtacaaagaattgtaagactttgtcaccttcaggtaattcaagttcttctttaaaccaagacacggcattatttgaaagttctatttccataataaaagtctcctttcggttcacaagtacttaacttatgactattggcaactaaattgaattagtatttttatatattacccactttcagtaatattaaaagtagtataacataatttttcaattagttatgtcaaatcattctacaatgcggagaaatatatataacgcatgataatgatacatataagtagtataatagaattaatgatcataaagctgtgtttaaatcttacgattcaatatgtgatataaaaaagctggaggcattaacgccccagctcaaattttgtttacaacatattattttgtagaacgactattgtaatagttacatccatttaattttaggttcttcacccttaaatatccttacaatattagttcgatgtctaataatgagcaatacaccgacaccaatactaacaataaataggatatagtctcgaattaataatgcaccaatgacgcaacaaatagatgcaatgatacttgataacgatacatattttgttaaatataatattccaaagaaaattgctgctaatattaataataagacaggattgacacctagtatgacaccagcacttgttgcaacggcttttccgcctttgaatccaagataaactggatatacatggcctaaaattgcaaaagcaccaacaataagtccatttgtgaaaaatgtagttattgggccttcagcttggacaggtaaccatagtggaaagaacactacaatgaaccctttaaatatatctaggaaagttacaagaaatccagcaggttttcctaatactctaaagctgtttgttgccccagtgttaccacttccgaattgacggatatcttttttgaaaaatagtttacctattacatagccacttgggaaagcaccgataaggtaacttagtattaacatgattacaatcatcatatataatccacatcctttaatgacattaaaattattttaccatataagcataggataatacgaatgaaaatttaaaatgggtattatttctcaattgaaaattcatttgatacttgcattttatcaagatttatataagaataactaatgtatagttttaaaaacgaacgtacgtttgtaggagggcgaaacgattggcaatgaataagaaaaataattattcggatgattccattcaggtacttgagggattagaggccgtaagaaaaagacctgggatgtatattggttctaccgataaacgtggattacatcatctagtatatgaagttgtcgataattccgtcgatgaagtattaaatggttttggtagcgaaatccaagttacaattaataaagatgaaagcattacaattgaagataatggtcgtgggatgccaacaggtatacatacatctggaaaacctacagtacaagtcattttcacaatacttcatgctggtggaaaatttggacaaggcggatataaaacatcaggtggattacatggtgttggtgcctccgttgttaatgcattaagtgaatggttagaagtagaaatatacagagatggcaatatctatactcaaagttttgcacaaggtggtaaaccaacaactggtttggttaaacacgggaaaactaaaaagactggaactaaggtgacatttaaaccagatccagagatatttaaatcagcaacatcttttaattatgatgttttaagtgagcgacttcaggagtcagcttttttacttaagcgtcttaaaataacattgaaagacttaagagctggaaaagaacgtgaagatgtttttcactatgaagatggtattaaagaattcgttgcttatgttaatgaaggcaaagaagttttacatgatgtagccgacttttctggtgaagctaataatatcgaagttgaagttgcattccaatacaatgatcaatattcagaaggtattttgagcttcgttaataatgtgcgtacaaaagacgggggtacacatgaagttggcttcaaatctgcaatgacacgtgtatttaatgattatgcacgccgtattaatgaactaaaagaaaaagataaaaatttagatggaaatgatattagagaagggttaacagctattatttccatccgtattccggaagagttacttcaatttgaaggacaaacaaagtctaaattgggtacaccagaagctagaagtgcagtggattctgtagtagcagacaaacttccatattatttagaagaaaaaggtcagttatcaaaatcacttgttaaaaaagcgctgaaagcacaacaagctagagaagctgcgcgtaaagctcgtgaagatgcacgttccggtaagaaaaataaacgtaaagatactttactttcaggtaaattaacgccagctcaaagtaaaaatactgagaagaaagaactttatcttgttgagggtgactcagcaggtggttcagcaaaattaggtagagatcgtaaataccaggctattctgcctttaagaggtaaagtcattaacacagaaaaagcacgtctagatgacatatttaaaaatgaagaaattaatacgattattcatactattggtgctggtgttggtaatgaatttaaaattgaagatagtaattataacagaataattattatgactgatgcggatacggatggtgcacatatacaagtactgttattaacatttttctttaaatatatgaaaccacttgtagaagctggaagggtatttattgccttaccccccctctataaattagaaaaagggaaaggcgcctcaagaaaaatcgaatacgcatggactgatgaagaattagaaaaattacaaaaaaaattaggcaaaggtttctcattacaacgttataaaggtttaggtgaaatgaacgctgatcaattatgggaaacgacaatgaacccagatacaagaacactcatcagagttcaagttgaagatgaattacgttcttctaaacgtgtaacaacattaatgggtgacaaagttgcgcctagacgtgaatggatagaaaaccatgttgaatttggattacaagaagaacaaagtatattagacaataatgaaatccaaattttagaacaggaacatcctaatgaggaggaaatcaattgagtgaaataattcaagatttatcgctagaagatgttattggcgatcgttttggtagatatagtaaatacatcattcaagagcgtgcattgccagacgttcgtgatgggctcaaacctgttcaaagacgtattttgtatgctatgtattctagtggtaacacatatgataaaaatttccgtaaaagtgctaaaacagtcggtgacgtaattggacagtatcaccctcatggcgactcatctgtgtatgatgctatggtaagactcagtcagggatggaagctgtgtcatgtgctcatagaaatgcaagggaataacggtagtatcgacaatgacccggctgcagcaatgcgttatacagaagctaagttaagtcgtatttctgaagaacttttaagagatattaataaagaaacagtaccattcatgccaaactatgatgatactactttggaaccgatggtattaccagcaaggttacctaatttattaattaacggaagtacgggtatttctgctggttatgcaacagatattccaccacataatttgggtgaggtgattcaggctacacttaaatttatcgataatcctgatatcacagtagctcagttgatgaagtatgttaaaggaccagatttcccaacaggtggcattatacaaggtatagatggtataaaaaaagcttatgaaactggtaaaggtaaaattattgttcgttcaaaagtcgaagatgaagaattaagaaatggcagaaagcaattaattgttactgaagtcccatatgaagtgaataagagttcacttgttaaaaagatggatgaattacgtgctgataaaaaagtggatggtattgttgaggtaagagatgagacagaccgtactggattacgtattgccattgaattgaaaaaggacgtaaatagtgaagctgtattaaattacttatacaaaaatacagatttacaagttgcttataactttaatatggttgctattagtgaaggtagaccagtattaatggggattcgtcaatttattgatagttatttaaatcatcaaattgatgttgtgactaaacgtacacgttatgaattagatcatgctgaaagcagaatgcatattgttgaaggtcttatgaaagcattatctattttagatgaagttatcaagttaattagagcttctaagaataaaaaagatgctaaagacaacttagtcgctgaatttgattttacagaggcacaggccgaagcgatcgtaacactacaattatatcgtttaacgaacacagatattgtgcaactacaagaagagcacgatgaattaaaatcactaattggacgtttaaaaaatattttagatgatcatagtgcacttttaaatgtaataaaagaagaattaacagaaattcgcaatcgttttaaacaagggcgtttgtcttcaatagaagcagagatttctgaaattaaaattgataaagaagttatgattcctagtgaaacggttattatgagtgttacaaaacacggttatataaaacgcacttcattacgtagttataatgccagtggcgtaaatgaaattggtgtaaaagacggtgatgtacttatgaaacatcaagaagtcaatacacttgatactgcattggtctttactaataaagggcgttatctatttattccagtacataaattagctgaaattaaatggaaagaattaggtcaacatgtttctcaaattgtgccacttgatgaaggtgaatttatcatcgatgcgtattgcgaaagtgattttaaaccagacgcattttatattttagctacgcgtcatggaatgattaaacgcagtaatgtttctatgtttaaaacatcacgattcaataaacctctcgttgcaatgaaagtgaaagatgatgacgaaattattaatgtcatgcgcatagactctactcaattaattactgttattacaaataaaggtatgtcattaacctatagtagtgatgaactctctgatacaggattgagagcagctggcgttaaatcaattaatctaaaagatgaagacttcgccgtgttaacacaggtcattagtgcaaacaactcaattttaatggcaacacaacgaggatcactaaaacgtattggtttcaaagtactacaaacagccaaacgtgcacaacgtggaattacattactgaaagaattgaaaaagtcaccgcatcgtattgtagcggctgacgtaattcaacctgagcacacgacttacacaatttattctgataaacaacaagaatctggcgccattaaagatattcatttgtctgaacaatatacaaatggcagctttattgtagatacaagtgaatttggtgaaattattgacttagaagttaattaggggtaattttttaaaaattattagtaaatacaactatatagtgataaaataccagttaggtgcaataaattattaaaaaagaggtttatagcagtgtgaaaagtatcgtattaggcgtatgactagggcgtactttttcatcattttataagtggcatgtaatgaaatgttacaattccttataagactgtctataaatctcttgctctaatttgaaattaaatattacatagatgagagggattaaattgaaagattttgatagtttaattccagattggttcaaagcttttgttcaagtcgggaatgatttaatctggtcacaatatctaattggacttttaataacagcaggtatattctttactatcggctctaaatttgtgcaattaagatggattccagaaatgtttcgtgctattggtgaaaaacctgaaacattagataacggtaaaaaaggtatttctccattccaagcatttgcgataagtgctggttctagggttggtactggtaatatagcgggtgttgctacagctatagtacttggtggtcctggtgcagtcttttggatgtgggttattgcatttataggtgcagcgagtgcgtttattgaagcaactttagcacaagtatacaaagtgcctgatgaagaaggcggttaccgcggtggaccagcttattacataactaaaggtttaaatcaaaaatggttaggtatcgtgtttgctgtattaattacggttacttttgcttttgtatttaatacagttcaatctaatacaattgctgaatcattgaaaacacaatataatgtagatcctataataacaggcattattttagcggtacttactgctatcattatatttggtggtgtacgtagtatcgccaatttatcttcagttattgtacctgttatggctattatttatatcggtttagttctagtgattcttatcatgaactatgatcaaattattccaatgatttctacaattattaaaagtgcatttggatttgaacaagtaacaggtggtgcagttggtgctgccatactacaaggtgtaaaacgtggtctattttctaatgaagctggtatgggttctgcgcctaacgcagcagcgacagcagcaccaccacaccctgttaaacaaggtttaattcaagcactcggtgtattctttgacacgatgctagtttgtacagcaacggctattatgatattgctttatagcggtttagagtttggtgaaaatgcatcacaaggtgttgccgtaacgcaatcagctttaaatgagcatcttggtagtgctggtggtatattcttaacgattgccattacactctttgcattttcttcagtagttggtaattattactacggccaatctaatattgagttgttatcaaaaaatagaacgatattatttatctttagatgtttagttgtcgtattagtgtttgtgngtgcagtaattaagacagaaactgtttggagtactgcagatgtatttatgggattgatggcgattgtcaacttggtagcaatcataggtctttcaaacattgcatttgctgttatgaacgattaccaacgtcaacgtaaagctggcaaaaaaccagttttcaaaccagaagaattagaaatcaatttatttggtattgaaagttggggcatgaaaaaataatcaaattgataattagttcataaatatcaaagcttaaagcgtcttttaagattgtcacgataaagtgacatcttagaggcgttttttgtttttttaattaactcgtaaggtatatttattaattaaaatagaataattctttcattttataattagtcactatataatattgagtaagataaagataaggatgattgatgtgaatgatttcttaataactaaggttctcaataataatgtgattatttgtacaaaagcacaagcggaatatgtattaattgcaaaaggcattgggtttaataaaaaaagtggcatgattttacaagagaatcaaacgatagaaaaaatatacatattggatcaaaaatcacagcaagaccataaatcaagctatcgtac

SEQ ID NO: 39 - DNA, 95963 bp, Staphylococcus saprophyticus
tctgaccaagaccaattcaagaaaattcaatctgcttttaaacaccaagaacctatcgtcttcacatcaatggaacctagttggttctctaaagaattagacgttaaaatgttgaaagatcctgacaacatttatggtaataataatcaacatattgacttagtatttaacaaaaactttaaagaggcacatccagctgcatacacaattgcaacacgtatggcagatgattggagtaaatctgacgaagacaaattagctaaaaaaatctttgttgataacaaaaatccagaacaagtagctaaagactatgtggatgataatgataataaagtagatgaatggttagaagatattgagactaactaattacaaagttaagatagacaaataaagaatatgctcgtttggtgtagcatatttaaaactcataatgcaaatttacagtagcaaaccaagttgagaaggcgcttaagacaaactcttctcaatcgtagctatattgcgagggagtgaaactaaactcagtttcgctcctacttttttatatcgctcttatagtattaaacgtttcaaataacttatttaacaataacgtaacgtttcttttcttttgtttgttgctctaatcgggtaggattagaaataaagttattgattataattattaaaatagcagctattataaataaaccaacttgtgtgtatatgttagcaaagacaagttccttgctacttagattgttaaataggccagccatatgtaataaaataacaccaaattgtgctaaaccataaataactaatgtcaatatggacacccataaacgagacataatgaacctccaaaaattaaatgatactttattttatcgcaaaatcatcgtttgtacaaaattaagaggataatggttttaacttgaaaagttgaccaaatttgattattatagaaagtacattagcactcattaacttaaagtgctaacatttaaacttttgaggaggaacgaaaaatgttaaagccattaggtaaccgagtaattattcaaaaatcagaacaagagcaaacaactaaaagtggtatcgtattaactgatagcgctaaagagaaatccaatgaaggtacgataattgcagtaggtgcaggacgtattttaaaagatggttctcgtgttgctcctgaagtaaacgaaggcgacaaagtagtattccaacaatatgctggaactgaagttaaacgaggagacgaaacatatttaatcgttaatgaagaagatattttagcaataattgaatcttaatataaaaaaaatttaaaaataaacaataattatcatagaaacaacatggaggtatataaaatatggcgaaagatttaaaattctctgaagacgcacgtcaatcaatgctaagaggtgtagataaattagcaaatgccgttaaagttacaatcggtcctaaggggcgtaatgttgtattagataaagaatatacatcaccactcatcactaatgatggtgttacaattgctaaagaaattgaattagaagatccttatgaaaatatgggtgcgaaactagttcaagaagtagcaaataaaacaaatgaaattgctggtgacggtacgacaacagcaacagtgctagcacaagctatgattcaagaaggtttgaaaaacgtaacaagtggtgcaaaccctgttggtttaagacaaggtattgataaagctgtagaagtagcaattgaggcattacatgaaatttcacaaaatgtagataataaaaatgaaattgcacaagttggttctatttcagctgcagatgaagaaattggtaaatacatttctgaagcaatggaaaaagtaggtaatgatggtgtcatcactattgaagagtctagtggttttaatacagaattagaagtagtagaaggtatgcaatttgaccgaggttatcaatcaccatatatggtgactgactcagataaaatggtcgctgatcttgaaagaccatatattttaattactgataaaaagatttcatcattccaagacatcttaccgttattagaacaagtcgtacaatcaaatcgtcctatcttaattgttgctgatgacgttgaaggcgatgcattaactaatatcgtgcttaaccgtatgcgtggcacatttactgctgttgcagtgaaagcaccaggatttggcgatcgtcgtaaagcaatgttagaagatttagctatcttaacaggtgcacaagtaattacggatgacttaggtttagaattaaaagaagcgactatggatatgttaggtactgcaaataaagctgaaattacaaaagacaacacaacagttgttgacggtgatggagatcaaaacagtatcgatgcacgtgtgagccaaattaaagctcaaattgaagaaactgattctgaatttgacaaagaaaaattacaagagcgcttagctaaattagctggtggcgttgcagtaattaaagttggtgcagcaagtgaaacagaattaaaagaacgtaaattacgtattgaagatgcattaaactctactagagctgcagttgaagaaggtattgtagctggtggtggtactgcatttatgaatatttatgaaaaagtagctaaaattgaagcagaaggcgacattgctactggtattaatattgtcttaaaagctttagaagcaccagttcgtcaaattgctgaaaatgctggactagaaggttcaattattgttgaacgactaaaaaatgctgatataggtgttggttttaatgctgcgacaaatgaatgggtgaatatgttagaagcaggtatcgtagatccaacgaaagtgacacgttcatcacttcaacatgctgcaagtgtggcagctatgttccttactacagaagcagttgttgctaatattccagaagaaagtaacaatgattcacaagcaggtatgggtggcatgccaggtatgatgtaaaaagaccatagaacattgatatgacagtatatcgttcgtccgatggtcataatttggtcatagaaatttaaaataattgttttgagacgttttccatgagattactaaatctttgggaagcgtcttttttgtatgattttgtaatgcttgcgtaaatattcatagttgtttgtatatctttatggcgtagtcgttcctgtatctctttaatatgcacaccagcttctattaaaaggctgcaatgagtgtatctgaacgagtgcgtcgtgatattcttatcaatatcagtctgtggcataattgcctgaatccactgtgacagcttcttaatgacaagtgggtagccgttattgtctgtgaatataaaattattatccacgtacaactcatttttccatttgtcttgcacattcactttataatctaacaacaattttataacgttaggatctattgaaattttaccgatagatgattcagttttcggtgtgagtatctgataatttttcttattgttattcggattataatatgttttggttatacttacagtacattcttcatagtcgatatcagaccatttaagcgccagtaattcaccagcacgtaatccgagatatgcaagacttacgaacacttcaaagctattcagtggcttatggtggttcttagcaacacttagaaactcaaataattcatctttttcaagaaatttttgttgtaagctattctgttccaaatcctcaacagtcggcttaaatttagccctcttaattccctcaataggcgacttagcaattatcttcatatccaacgcatacttaaatataagattggttgagcttacaatactatcaacataatttttactaaattgagtacttatatcgtccacaaacgcttggtagtcacgcttagttatagtctgtatacttctattaccaaattgttgtttagcgtgatatatggctttttctcttgctctaacactactcacttttgcatttctactataatgattaatccattcatcagctacataattaaatgtatgagtagacggtgcaatatactcgccatttcttatttgtctttctaccatttcagcatgattcttagcatcagacttgcgagcaaaacctgacttagatatatattcatatttaccagtattaggatttttacctagtgatatgcgataacgccagttgttaccacgtttttcatagtttgccatttaatcacctgcctatttgtctataagtcatcttcgcttatttcttcttcagtataataattatttaagacttttatactgccatcttccaaaaatactaaattttttaaatgtttataggctggaatagtttttttatttaaaaagtcattttcattgtaatacttcatagtacttacgatttgggtatacggtaataaattaattgaaattgtttgggagttaaaattaaacatttttttaaaatcttcattttttttataactttctattaaaatttgaaggataaattcaaattctaacgatacgtattctttcatttgaccagaaactactggtttataatagtattttccactagttaagaactccataggtaaaacccctgaaacagctacatctatatagtcttctgtaaaaattacagttaacaatatattttgttgttcactttcattttcgatataagaacatgaaatgttataaatccgatcatcatcaggtttactaaaggcaaataaaccatgttttgaaactgatatatctaataattttaattctttaaacccatcatctaaaacaattaaatcttttacgttacattttagagattgtattaatttctctaatgtatcaaactgtatacctttacttttgcctgtagataaaagacttaatgtgtttattgataatccagtattggctgataactctttgagagttatctttttttctttcataactttttttaaattgaatttaatcatgagaaacctccattgaagattaaataaaatttatcatatgttagtaaaatatacaataaatattgtgaaaaaaagttgacagtattaaaacaagaaggtacactttagttaattactaataagttagtaattttataacaatatattggtaaaaggagagagggaaaatgaccattactgtcaatgaaacattaattaaaaaagccatgtttattaaagggtttaatttatctgacttagctcatgaaacaggtgtaggtatttcatatttaagccaaattataaacggcaagaaaattccgagccctaaattagctaagaaaatgtcagaagttttacaggttgatgtaagtgaattattcgaatttgaaattaaggaggcataaaccatgtttaatatcggcattgatgaagatgaagcacgtgagatgctgcaacaagcaattgacgagcgtatcgaagaattagcgagagaaaaatacttcatgacttacaacgagttatcaaaatatcttaatttatctaaacctactatagaagatttgctaatcaaaaatggaatgaaatattaccgagtaggtgtgacatacagatttaagaaatctgatgtagatgaatttatgaatcatattacttcacaaatggacattgtgaacaacgatctaaaaaatttgaaatttaaggagaatgcaaaatgaaaacatttatcggattaataacacttagtgccacagcatcatcagtagtagggattgttacacaggatatatttaacactctagcgttatatacgccactagcacttatatcaatagtagttaaaaacagtttggacgatagaagaatcagacgtaaatataaacaattaatggaggaaaaataaaatgaattattcagaaaaaatagaagaaacagtggaatgtacagatttaggaaataagattcaatcgtgtatggattatcttgcaacagagattgaagcagtagaacaaactagagaatgggcaatcaaaaataatgaatttaggttacaacaagaaattaataatgcttggaagtcacattatgttgcgttatctattttaaaaagcattagagaagataacgaacgtatgaatgatgaaatagtaatgattgttaaaaatgagcaagaaaaaagcgcatctgtacagtcggcaaactcaacagataacgcttaacgcaatttagaattttaataaaaaacaagcatggaacggcttatttatatattaattataccatttcatgccttgttttaacagtaggagggcaaaaataatgggttttgaacaaataaaattacagcatgatattcgattaaatattatagagtacaaaaatttatcttcctattcttttgttcaaactaatgatgtgatgtggtcggaatggcttaatagattgcaaacaccaatgaaccacaatgaaaaatatcaacgtgggttggtagtttatggtgatgttaaagatgttgaacaagatgggaaactaatacaaaaatatcgcaatgatgaaaatattataaatagaaatacactagcacttgattatgatgatattgaagatttcaaaggattgtacagtgctatctgtaaacagttagaaggcttttgttgggcatttcacacaacttataaccacactacagaaaaaccacgtattcgccttatggtgcctttaaataatcctgtgagttcagatgattatagaaagtatacacaatcattggcgaagaaaataggctataagattgatgaaggtagctatcaaccatcaagagcaatggcgttaccagtaagaccagataaggatataccatatatttttaaatataatgatgcaccagcaataacaaatgatgatttagttgagttatcgaaaaatctagaaaatacgcaaaaagataaatcaattaccatcaactactcaagtcatttgaaaaaacgtgattcaacttattggcgtgatcttgcgtttggtgtaagtgaaggtgggcgtaatcaagcgctagcatcaattagtggttacttattgcgtaggtatgtagacgtaaaccttgtatatggtctagtgatagcatgggggaaatcttgtaatccacctatggacgatggagaaataaacaaaacatttaactcgatactcaaaaagcatatgaacaactagagggggacggtatatgacagtagaggaaatggaagtaactaaagaagatgtatttgaaactatgaatagtcttgaaaaatttcaagaaatcaataaagataaaccaactattccagaaccttatttaatcaaaggaaaatggttgtatttggaaaaagagaagaaaaacaccaaaggtgaagttattgatatagctcatatttatattacaagtacgccaccttatgttactgaaaggtataaaaatgttgaaactggtgaattttattacgaattacaattcgaagatgaaaagcgtaaatataaattaccagtattggctcgagatattacgcaaggcaaatttttagtagaacttgccagtaaaggtttagaggttactcaaaatgaagcaggtaatcttgttcaatatcttagtttttatagacgttttaataatatacctgattatgatgtagctacacgattaggtgaaattaaaggtcatttcatatcaccatatcaagaagatcagcaagataatcggtataaaatatttaattcagacagaggatatcaagcgctaattgatgcatttgaaacaaaaggaaatattgatgattatataaaaggtgtatttaatcctataaaggacaatccaatggctatgatgatgttttatagctcactaggttcagtattacttaaagattttgatgtagacccttttgtaagtgagatatcagggcgtacatcaagtggtaaaacttttatattaaagatatgtgcaagtgtatggggaaaccgaaaattagttaccgaatggaatgccactaatgtgagtgtagaacgtatggcttcatttatgaactcatttcctttgattaaagatgatactcgaaaagccgataatccatttagaataccaagtatcgtataccaattttctggagggcaatcaaaaggacgtggtaattcagaccgttctattgattatttggaaccgtggaacaacatcatgctttcaagtggtgaagttgctataccagatatagcaccagataaagcaggagtcgcaggacgtgtgattactttacaagatgacccatttcctaatactgataaaactgaatttggtgatatagcaaaagcaatggaaaataatcatggtctattaggtaagttattcatcaaacaatatcgagctgataaagataaatataaagcatcatttgaaggtgctgttaaatatttcatgaaacaggctaacggtaacgaagtaatggatcgtatcgcacgtagttttgcgctattacaaatcacaggcgagatattaaatgatattgaaggctttgaacatgacccatatattaatgtgaataaagcacatacaagtatgatgaagaataataaaaatattgataaaccaaaacaattattagaagaattacttgaaaagttaaatgccaatcgtggacgtattgcatataataagcattattatcatgataatgcagagttaatggcaatttatagagttgattttgttcttgttatgacaccaacaataaaagaaatgttaggtgctgaatttaattccactgtcaaacaatgggatgaaagagggtaccttgaaacgaataattatgggaaacaaaaaaatataagatttaatggagaacaacaaaaaggttatgccatcaaaactgaaatcattaacgaattaggattcgactttaagaaagaagcacaaagttactagtagttaccacctagttactagttattcatcaaaagtagtaacatctataagccttgatatgacagtctttataattggttttaatataaatgttactactgttactactttcaaaataggaggtcatatataaattaatacaaaaaactctttcttgcttataagagtacccccttaaaaaaagtagtaacactagtaacagtagtaacttataaactaaaacatttatatggcagcatttatggaatatcagaaagtagtaactttaataaaaaagtagtaaccaagtagtaacattttaaagtaacggacaaaaaggagaatgagaaaatgagatacctatacaatagtggcaacagatatggaacagtagtaactaataataatgtacatcgtgtgattacagaatatcctcgtgaagtattttactttaacgatgaagaactatatcaatatatgtcatataacgatttaggatttaacgcaattgattttaacgatatgacaatgctggaactcgaaacactattaatgtggtgtaaacaattagagcctataaaatcagttaatgaaaactattccagttacaacttaaagcatatgtttgaacgtgagccttatggcttttatatatctaacggaaacatgaaagaagtcatggcacttgcaggatttaagcctaaaaatgctgatgatctcaactggttttatccgataagtgagcgaagtattaagcaactttaaaaggatacgaacatttaagtttatatgcttacaaacaaataataggtattaacgatattttatatctatattattaaaggggatatgcacatgtggtatagagatgtggttaatcaaattgttgccagattaccaacaaacataaataatgtttcagatagttatttagatactgtaatcaagcgatatgtaactaagcatgaagatattgaagaagtgaaacaatgtattaatgatatgaaacaaagcaagaaaattaaaacatacaaagattttataactaaaaaataagggagtttttttaatggctaaagtaaatgaaaaatcaatcgaagtattcaataaggtaattgaaccaaaggtagagaataaaaaatatgtagcgttagaaaagattaaagtaactgacaaacttaaagagtttgattttaaaatgtctcactatcgtgctgaaaacgattatacaatgattgcttcacttaaaaaggaacaagggaaacttgagaatgagattgtggcattacatgagcaaagtgaagatgataatcataagttgttagataaagatattaaagactttaacagcgcttatgaaaaagaggttaaagaattaagcgatataaatagtaagttaattcaagacttcaataacaaattgcaagatgcatatgaagtatatgaaaagattgcagctaacaaagtagaagctattcgtagagcgtcaagacgcaattatttgaacacagcaataagcaatccagaccaatggagattaagtttacaacgtaatacaagcttagttgatgatccatttagaactaatacagaccctagaataatagctaataaatttgaacagaagttatttaacattaatggtcatgcagattcagaatttaacaacggaaataaaaaatggtagggggaatttaaatgagttacacagttttaagtccattagaacaagattacgcattagggtttgatgaaaagaaaaatactattattttaaaaccactatattcaaatacgaaagttggaatagctacgtccgatggtgttgcaaattctagtattaattataagaatggttcacttacaagaagagtgttcaaaaattttaaagatacagacggaataaacatagtattgaataacagtaaaaactcattcgttgctaatagtaaagataagggcgtgcttactgttattaatgaagaatatattggctttggtattcaggtagataaggttgaagataaaggcgaaggattacaagaattagtagatatagccaagaataagaaatctgtatcagtacaaagctatgcaagtaaaatagggatggataatacaacgatagggaacattgataagatagaattaatatctgttaatacaaaataaattacttataaaatagtattgttataatattatttatgtagtataatgtaagtaggtagaaatctaccattgaatgctttataaatcattcagttaattcttctggtaacaatttattaatagcttgttcttgtaaattgcacgtttccttatacgccatcatcacttgtcctgctcttgtacttgtggtggtggctattttaatatcaagagtttgtgcatacttatatattcaatagatcattcattcttcatatataacttatgattgatgtgtgattaatatattgatattgaacattgttaaagcaagagaaagattataaattgttgtgatattaataatagaagtattcaagttagagaatattataagttataagttgtattgaatgatgaacaacagattgattcaatgatgattaaagaataaataattagttcaataatgatattgagattagtaattgtatttaactaaatgattagatcatattaaatccttttacaataacaatagaagattgattaagtaaaataattttgatgaacaaacttagatgattacaaaatgtttttgttctttcgtttgaagttaaaattaaaataaattataaaaataaaaattaataaacaattataaataaacatttaacttgaacatgaatacaagaagtatcttcatactaattcataggttaaatgctaaatagtgttaatagctttatagcaaacagtttgctaatacaatggttataaatcgttcgataataatgagaggtgttcagaagttgaaataatcatataatgtggctaattgtagatctaaatagaatcataataaatagcaagttacatgatgaataagatgataaaacacttgaaaatcatacttcatacaagtcatttagagcttgttttagaacatgtaacaacagtgtgataaaggcgttataaatagtaaatgcatgtcattttagtgcagctattaccagttgaacagcatcaatttaaaaaggggaggcatctattagcccccacttgttttgaagttgtttgttatcggtcgacaggtaatctcgctagaatgttgaaaatgaaagttgaaaatgtgtaaagaaaagtagctttacatagtgagaaaatcatttagaaaaggggaaattgaatggctcaaagaaaattattgtcacagcaaaagagtagattaactacagaagcacaggaaactaagcaagctacagaagaagcattgaaacaacttactaaattacaaccagagccacctgaatggttagatgatacagccacaaaggaatggcacaggatattcccgttactagaagaattaccaatagctagtttagatttagcactagtatgcagcatattgcacagcgtattcggactaatcaatgcaactatacgaatgaaaaaatgaaagtgcaattaatagaaacggaacgtggcacgaaacttaaatcagaatcacgctattaaaagagattcactatcacaattaaatagtattgcgcctaagttgggacttactgtggaatcaagattgaaaatattagatccttcaaaagaaaaagtgactggaaaatcagtttttgacatattcggtatggatgatgacgattaaaaataaatttgtttcattataagtgtctaggagggctactatgatattaaaacgttgtaaatcagttttgtggtataaagaagaaatgaaaattactgaatatgagttgctaactaattacaatccacaattcattaatagtaagattcgagcaatacaggaacaaatcaatgcaatgtatcatcttaatacatcccatacagtgtgtgatgaaatcgctggtgttattacagtttcatatccattagataaattagttatatggataactgatcaaaaagatgaattgaatcgttttaaaattaatagtaccaagaaactcaatttattgaagaaacttatcagtaactatacacctaaggaacaaaaagaagtgatgagatatttcaaatctaatgggagtaacaagccttataagacaattgataagttacaggaagatttatataagatacatcacaataaacgtatagaacgcaatgaacagcgtgaaaaagagaatgaagttatatatcaaaactttgtagtagaagtgaaagaaagcttaaataaagagcgtgaggagttggttgtgtgattagaggattagataaagtagattatccaatattagaaaaatacatgcgcaattatcatagtatggttgatacttataagtatcaacctagtgatgtgaacgaattaaagtatatgaacctagaatcaattgtaaaggggattacagaagtatataacgatagtgaagttaaagtgcaacagattattaaactcacatggtggaaagataagaagtatacagatgaagtgatagcaagtgttataggtatcacagaatacactttaagacatgctagagaggttatattaaagcgtgtagcaaaggcagtagaatatgtatgaggtatgacaaagcaactgtaaaagagttcatattaaactaccacaagatacaagataatagctatacatgtgatgaagatgttgggattgatgacttttttaatgttaacaatcaagtagaaactcatgagatagataatagcaacattgaagatgtgatattctataatgaactagaagctgttattgaaagagtagcgactgaaaaagaacataatttgtttttattaatttgtaatggtgtgagttttgaaaaggctggaaatatatttggtgttaaagaggcaagagctaagcaaatgttgaatagattgttggataagttggaatgaaaaactaggggtaggcacttatgtgcttgccctatttttttatggtataatttatttacatgtataagccctttcccgaatagttttatatccgccacccacacatgtcactgggtggtatttttttatttacatatgcgaacaagtgttctattatattcatgaggtgattataaatggaaccaaatttagattggaataaagatttccaagaattccaggatattttgaattcaggaatacatcccgaatggttatataacgcaaaagcaaatatgatactcaaccctgcatatacaggacaaggcaaacaattcttctttacaaaagatattataaaagctagtaaaacgattccatttttttgaggtgattatatgaaaccaatcaatccagatgtaccagatgaatacaaatacgaaactgattaccgtaatatacctagagagtatcttaatccacgtataccaaaagggcgtggaattgttaagtggcaagcctttaagacgctgcctgagcaatacgagcaactagaacaatacatacaagaccaaaataaaattgaaaaaccgatattagacgacgatcagttgaatgaattaaataacacattaattttcaaaatgtacaacgacccatctattgaattgcgttacttcgaaaatggatatattaaaacgaaagtaggttacattcataaagtagatgtgtatactaaaacactgcacatgtatgaagatactggaattagtatattgaatttaaaagatattgtggagataaaataagcccacctaaatgaaaagatggggttaactatttgatttctataatatttaaaccttctgaaaattcagggggttcgaagaaactagaaacatattcgaaagtttctttagtatcgaattgttctctttctggttcttcactacgtcttatattaatttgtttcaaacatttatcatcacttatattgagaaaaattaattgatgatttgcattaatttctgaagctacacttaatagccattttctttgagttttagtgttacctggaaaatctaatactacattactaccgacttttaaaattcgctggatgtgctctttcaataatggttttattaactttgagtaacttaagtaatcatcaaaatcatttatttgatttggatataatttttctaaccattcatcttcagacaataaaactgcattttcagtttgtgctatctctttagatctagttgattttcctgctcccatttttcctgagaaaaaatataaagttcctaaattattcaaatttatgtacctccgatttttttgaaaagtgtgtaaacgaattcttcttgtgttgatattaattatatgaaaaattatattaacaaacaaccccccactcatttatatgaataggtgggttgttttgtatgtcaattaagatgaaaaataataagggtaggtgtactacccttattattaatttatagccatccgagacttttagcaattgtgaaacctaaaccaactataccaatagtccaacctataattgtgtttctattttgctttgcttctttgtctaattctttattgttttttagtaaaatattttcaacttcagaattagtaggtaacttactaatagaattttgcatttcactgcgtaaataattagaattagtattcatttctgtacgtaaactattcatattattgttcatatcagttctgatgctattcatgttgttattcatatcagttctcatagcacgcatttcatctttgaattcttttattccattattaaattcatctctagttacatagttgttcatatcgccacctccggattcatcgtttttatttaattccattatatcatctttttgatttttagtatcattcataaaattgactggaatatcaccatttggatatattctgtttaataaagttttgtgaggtacaggctctaaattactcattattaatctccttgtgatgataaataggtattttagtacttaaaatttcgttctgttgtggccaagtcatccaattcataaaagtatctttgtcaatttcttctttaccaatttcttcaggcaagactaatacttttaattgttgataaatattagtgaaatcgtaacttctattattaggttcaaatttatataacgtgaattggattgtttcataaggttttttcatggtttcggcatttaaatttaatgtccaaaaattacgtaaatcaaaaccgatacctccaaccttatcgtataatagaattattaaatataattcattatctgtattataaggattatcaattttgtctaaaccactcaaagtgaatttaatacctaattctgcgtgttcatataacaatgaaaagtctagcaatggatcatgttcaggtttgcctgtttgacctatgtaaaactgtaaattacttagtgtaggttttatttctaaattactatttccaacacccattctacatacccccttatttaatttttttatattcaaacacacgcaatgcctcaaactgaaattattaaaattcgtgcaacttattaatggatattgtaaaaaagataatgatttaattgtactatatctaaaaaataatggtgataacaaaaagttatgattaatataaaaatttaagaatttgtttatatttaatgataatatggacataattatagaacgtcaaacgaacaactatacgttaatttatttctcgatgcagcacagggcgaatgtcagaatagataaatctcttaattatggttagaatatttaaagtatataaaatatttccaaaaaggaagatgtgaaatgattgaatatgaatggttgcatctaaaaagtgaaaatagatctaatagtaaaattttgaatgttttgcatcccgattttaaagaatttggaaagtcgggaaaagttttttataaaactgatataaagcaagcacaactagatgaagatgactataggattagtaattttgaagaatacatattgtctgaagattgtatattatgtacatatactatggttaatacaacaaataatattataactaatcgaagttctatttggaaatactataaaaatgattggaagttattgtttcatcaaggtacagaaatacaatagctgtaagttatatttatcattcaacgtagtacagagtgtaaaattttggttttgtagttgtataattatttgatcacaataagtaggtttagataatctatagcacgatgtctatgtgactaggtaagttatattaaaaactcactacaacttacaagatttgaatcagttcgtttattaaaagtgaaaccgtgtttttaataaacgaaggagaagactcaattttagtttcgttaaactttataaataaattaagtgtttaagtaatacaattttcttgttattttaaaaaatttatatgagaatggtaatatattacatcatattaaaaaggggagaaataatggacaaaggacaattagaagataatttagcaaccgaacttggttacttggaacgacttgtaaatgataatgaaaatactatattaggtgatttgaaaatgggtagaaatatagaagaatcccttagttggtttttagttaatttctttgctcaattttcagaagaaaattttattttaagcaaatacacaatattagatgcctttgattatgttaatagtagtaaagttttattattaaacggagaaaaaggattgatatttaataaggaagaaaagtctgttgaaattataaatgtaaaggtggacaaagttaagttcaactatgcaaattttgcagtttatgatgaaatggagaaaaagactgtttcttacccgaaaattgaggaattgactttcgaaataaatgaatgtaataatctttttacaatttctgaaaaagctatagtttcttcaaaccagaatgaagacttccaaaaactaattgaaatgttatgtataaacaaatggtcttgataaaatttttatattacttattatgtgctactttaataaatttattttaaggaatcggaatagattaattacagatatcaataaaaaccaaaaataggtatctcacacatacgatacgtggtcataatttggtcataacagaatgaaaaaactaaaaataatggcatatgtaaaattataaaacattgatttaacagtcttttgttaacgtatttatagtagtttgtatatgtacagaatgccaggtatgatgtaaaatagcattcaaacactgatttgaaggcatttaaaagtcataaataacatcatattgacataaaaatttaaaataattcattagagacgttttccattagggcactcaaccctttggaaagcgtctttttagtttcctaattgttatttgaaacggacgttgattattttcggttaatccttgtgatataattgtccatgtatttcaataatactaaatcaatatcaattaaaatgatgtcatgcatgtgtctgtgttgcattgaaaagtaattagttagataattatatatataatgattacatagggtgaatatagatgaatgaaatttttgtttttataatagaaacgaatgatgggaatgtatttcgcgagtatgtagaaaatgttttagaaatcgatgaaagattagctttggaacgatttgaaaaagcaattagaaaacatcgttatttttatttaaaagatagtggcagatatataaatgttagtcatataatatcaataaaagtagaaataatgtaaaactcatccatttttaactaacctttgtatgtttattgataactatcatttaactttaaaaatttaatgtattattttatttatgctttccataagttttacacttttgggaagcgtttttagtttgaataatgatttataatgtgattgtttcatatgttaaaataaacccaaatgattattaggagcgacgtaatgactagaaaaacaacttttttaaaagcgattgaccaactttatgaaactgcacacttattaaatcaatatgaaaatataccgagaaaatatggtacagatgatgaattgtatatggtcgaagcacatatgattaatctgattggtgtcaataaggtaatgaatatatctgaaattgctaaacaaatgaatagaactaaaagcgcggcttcacaaaaaataacaaggcttgttcaaaaaggcttagttgttaaaaataaaagtacacatagttctagagaagtcagtatcgaattaactgataaaggcgaaaaagtatttcaatatcatcaggcattagatagtaacgtttataacacttatttagaaaaactagaaacatatgatactaaagattttgaaaacattgagcattttttaaacatgataagtgaaaacttaaattatttaataaatgatacacgaactcattaacctatatattaaaagatagacactacaattaatccaaatttttaaccaaattaaaccattgtatgccgccatgtttagattcagaaacgccataatttaaatagctatattgttcgtaaaaagaaatcaaagaagctttgcaagttaatgttataccttgacgttcatgttctattgcaagatgttctaaatgatccaataattttcctgcaagaccttggtttctataactttcacctacaaccagccctaaaatagcgatatagccgccatggggagggttctttgtagtttcatcaaataaatcatcagtgataaaagcttgattaataacaggaccattgacatagccagcgatttcgccatcatattctgctacgataaatgtatctttgataacattaattctattaataagtgcttcttttgaagcggcttcttcagatgaaaaacccttattctcaatttgtaaaatagtattcaagtcacgcatagccacagttctgaaatgatacattaatgattcctcactttatttttgaatttttgaaattaaaaatagtttagcaccttaactattttccgtcaaatattaaaaatatgtatagaaatttggttatataacaaatattaagtgtcaatgagtcgtatcgttcatattaagaaaataaaatttcaatatataagataagggattacatttgttatatgaataatcttttaacgatttgggtaaagtaagtaggtataattagtaacggttcttatacaagtgtgataagtttctaatattttataagaaaaggagataaattatgacaaaaccaacagtgtatgaggttcttgattcaggagtgaattatctgttatcaggttacgataattggagtaatgaacaggtattagacgataaaattgacgcttttcctaatacaattcactggcaatatgggcatgtgctaacgatttttgaaagtgtattgtcattatgtgaacaaaatgaagttgatattgctaagtatacaaatttatttggatatggttcttcacctgaaaaatggggagatagtgacgtacctacaattgatgaaatatttaaacacattagaacattacctgaacgtgctcgcaaacttacagatgaacaattagaacaagagcttactgaaacaatagctggttgtagtacattaaatgaattattagttctcaatgcgattcatattccgttacacgctggaaaaatagaagaaatgtcgcgtgtacttaaacaacaacaataaaaaaatggagcgtgtctgatgtgacatgctccatttttttaactatattatttttgtaactcagcaatggcttttgcaatagaatcaaatacatgtggaatatcatctttttcaacacaactaaatgcaattctaatatcagtatcgttaagtgcgatgataccgatagaatagttattgataagatgaagtcgtaattgttcaggatctacatcataaacttttaaagccatgaaataaccagaattaaagtcgtaagctttccagtaggatgcatattgtgggtcataaaccactgcttttgtaacttcgtatctcgcttgtagcgtatcaatattttcttgaatctctttgtcgaaagtttcaggatgctctaatacatatttcactgcactttgtgaaggcataggtccgctagatatattacttctgattagtcctttaacttttgcttctaggacttgttttgttgtttcattggatacaccaaagctcataaaacctacacgtaatccccaagcgaagaactctttcgttgcaccatctaatctgataggtaataaattatctaaatgcaagtttgttagtgcagtaaataatgattgtgtataaacatcttcatagaataagccgtaataagcatcatctactaaagcaattacattggtaccacgtttagctaatgcttgaattgcttcaactattgtttttacttcatcttttgtaggtgtatagcctgttgggttatttggataatttaaaattaacatcactttatcttttgtataattttctaaagttgcaattaagttttctgtcgtaaagtgtcctgactcatcaaaaatatcataagtttcgatatccgcactatgtctcgtactataaactaatttataatttccccaattgtgcgttggtaataaaatcgtatcgccactatcaataaacatatctgcaacgagtgataaaccatgtgttaacgcatttgtaagtattggtcttgtcatatcagttgcatttaattcaggattttcttttagcattttctgctgccataaatcgcgtagagattctataccttgtggtggggcatatggaaagatttcatctggttctaagtttgtaaaaacgtcattaagcgtgtcagcatacatcttgctatgcttatatgttgccataccaattgtagcattatattgagtagattttgcttcagcagattgagataaaatgccttttggataatacattaattttcctaggtcagataacatatctgcaatttcagggtttgatttagataattgttcatttaaatctaaagctaaaggattcatatgtgggtcaacctctcttttactttttcaatgatacctttatattatcttgaaatagcttaaaattaaagcttagtggctatattaaattaaaatttaaaaaatctatacatttatacgaacacacgttctgttttgtgttagaatgtggataggccatcgaattcctacatggtacttttttctgtgggaggtgtaatatgatctcgtggtggcaagaaataattacaactttattaacaggtagcttacttgttgtttttcgtgtttggttagaaaataaatggaatgacaaataggtggccttacacaaaaaaaccccaagtctgttggcccagacttggggttgtgtaatataatccgtggatacatttacaagtttatcatccagaacgaaatactgcaatcaatttattttacagttaacataacttatgattaaaaaaatataagttctcaattataggtttttagtaattattggtaaaatttgatacaataacattgtttgaggtgaagagatgaaacatttaacaaagatatttgtaattattgcaatcgtcttgttcatcgttggttattatttacaggcaacaggacaagaagattctggaattaaattacttattgctgcaattatgtttatgatttgtgcttttattaatagaagcaataatagacgtaagaagagaaatcaaaatcgaaaatagagtcaataaaactatagttagtgtggagctgagtcgaatttagcaaagcactagctatatttttttatattttaaaacgcaaaatgactaatgacgaattgcattatcaagtaaaataataaagtgtatgtaattataaattaacactttacaaacgtgtatatattgtatatattgcgtatatacagttgtaggggaggacgtccatgaaaatacttttaaaaaatagtagtgaacgacctatttatgaacaaattaagcaacaaattaaagaaaacattttaaagggctatgttgcaccaggtgagcatttaccgtctatgagagaattagcacatgatttaagtgttagcgtgataacaacaaagcgtgcatacgaagatttagaaaaagatggctttgtttatactgttagaggaaaaggtacctatgttaaggaacaagataattcgattttaaaagaaaaacaatttattgttattgagtcattagctaaatcaatgagtaaagaagctaagacaataggcatgtctttatctgaattacaagaaatcgttgagctgatttttgaggaggacgaagaatgaacgcgatagaattgaatgctgtcaattatcagtataaagaattcaaactaaaggacgtttcttttcgagttcctcaaggatttgttactggatttattggagctaatggcgttggtaaaacgacaatcattagattaattatggatcttatagaaccagatgaaggtgaaattcgcttatttgataaaagaatggatcgtcatgcagttgaaataaaaaataaaattggttttatttattcagaattatatttaaatgataagtggaatgttaaaaaaattgagtcttatattgcgcctttttatagtgagtgggattatgaacgctttgatttttttcttgaaaaatttaatttacctgtaaacaagaagattaaaagtttttcaacaggtatgaaaatgaaactatccatagcaatagcatttagtcatcatgcagagctatttatacttgatgaaccaacctctggtctcgatccaattgttagaaatgaagtgttagatgtcattcaagaagaattaattgatgaaaaaaatccgtttttatttctacacatatcatttcagatttgaagaaaattgctgattatctggtttatatcaaggatggagaaatcattttgaaccaattttcagatgatattctaaatcaatatcaaattgttaaaggcgacccaaatcaactagataatgaattgattgatttaacgcattacattgaatataatcatacgggttttacagcacttacgacacatgctaatgtgtttaaagaactatttggtagtgatgtggcaataacgaatccaaccatcgaagaactaatggtttacctcgaaaaagggcaacgaaaacataaacagtatagtgatggaattatatagtggggaggccattcgatgaagaatttactaattagaaatattaaactacgtaaatggactatcgttatttatgccgtattattattaatatctccattacaattaataatcgaaaatcattcattgcttacaagaatactttattctttagttgctatgattttactatttgtttctgtccttgattcaggacatgtatttcgactgaatagtaagttaggccactcaaatgcgtatgatttttttggtagtttgccagtatccaaaaaggatatgcttaatgcaaactatgtaaccttaattttatttacactgattggggctggaatattatcactttcccatattcctaattcaaattttgctgctagtggcattagtattgatgttactttaccttattcatatatcgcaattaatttctttgctatacctatcgcatttaaaaaatattccgaacaaaaatctgaaaatatttcttatttaatgtatttgcttgtgatgttattcattattccaattgttgcagtgcttataacattagcagtattactcatattcaaaattaagttaactgcacttgattattttgagccagtttttaattatggctttttaggcttaagtatcatttttcttatagctaattattttatacagtataaaaaagtaaattaactttaaaaggaggcgcatttatgcaattaaagaatataacaaaaacatatggaaataataatgtgcttgaccatattgattttgattttggtcaaagtcagattgttggtttgattggtaaaaatggtgtcggaaagacaaccttaatgaaagtcatgaatggaaatattatcaattataaaggagacgtcaaattaggtaataagcaaaatgttggttacttaattgaacatcctaaattgtatgataataaaacaggtttatttaatttaaaactttttgctaatgtccttggtaatggttttgataaaaaatatgcagatcaaattatcgatgcatttggtatgagaccctatgttaaaaagaaagttaaaaaatactctatgggtatgaaacaaaaattggccatagcagtttcattaatgaataaaccaaagtatttaattttagatgaaccaacaaatggtatggatccggatggttcaattgatgtgcttaaaacaatacaatcgcttgttaaagacttagatatgaaaattttaatttctagtcataaacttgaagatattgaattgatttgtgatagagccgtatttttacgtgatggtaagttcgtgcaagatgtaaatatgaaagagggcacagcatctgattctacagtcattatatttgaaaatgaggattttgaagctggattagccttcttaaaagagcaatataatgtagtacaaacgcaagaagctagtggcgaagtgattatcaatgcacaacgcagctataaaaaagtactaaaaggtttagcaagtgaatctgttttccctaaatttattgagacgcgtaagagttcgttacgtgatacttacttcaatattaatcagaaaggtggccaataatgaatagtttacaactcgtaaaatatgatatgtatagtatttttaaaagtccattaacttacttagcgttacttttaacaattttaccattgattggttttacaatattatttgttcgacaatcagatgaaatgaatggtaatacattactctctatcggtagttggttcttttcaattatgggcttactatttgtaataaaaacaattacgcgtgatatttcacaaggtacaattcagctttatatgaataaaacatcaagccgtattggttatgtaatagctaaagtaatttctatcatacttattgcgatactgattacagcagttcttgtgggatttgtacttattgtgcaaggtgtagttgatgggaagaacattactactagtaaagcttttgaattactatggttcttcttaatgttccatttattctttggtttattactttatttattttcacttattgtgcctaagacagcacttatttttacactaggcatatttttagtattaattgttcctttcgcagaaccatttttaccaatgattcctaaaattggtgataatattcaagattcattaaagtatataccttttagttatttaacttcaaaaacaacttctggggactatacattcacaaattggcaatggtttattacttcagcttcaattgtaattttatttattgtaaatattttctatgtttctaagaaagatatttaaaataataaccgataagtaagtcaatatataaaagacgtatgaatttgcggttagtctcagcatcattcatacgtctttttactatttaatgattaatttatctaaaatggagtcatatacatatttccaaagttgagaatctgttttataacgattcgtcataattttatgtgcttctgcagacttatcttcaaaggtaggatcatcttttgaagggacatctgaacgtgtatcttcaacaaaatgttgaacttgtctagcacggggaccccaaaccgtttcttgttcaaaattatcattaaggaatacaaaaataggtattgaacgtgcagtaccatttgttaaatactgatcaattaaatcagtgttctcatcacgatggaaaacgcgaacttctaaatttaaagcttcactaatatgttttaagataggtacattcatcatggcatcgccacaccaatcttccgtgataactaacacttttgaataatttaatgatttaattttttcaatacgatcatcatttaatggtaaagagaaagaattgtaaatagataagacattctctttgttttcagtcatgacctcgatatattgatcaagtggttgactgtttttgaaatatgtttctaaacttgtcataatatttccccctttagcttattagatattattatatcaattattttatatgaaagaaaattttaaatactttgaaaagttatgcattttacgacattcttttaagatgaaagagactattgtgtatgctatattgattaagtaaatggagttgaaggaaagtgaattttcataaaataaataaatggctagtatggagtgtttttatgttaatgggaatagctacattattcattgtaagttacataaaaaatgaacatactacagatttatctcgtattaccattgatgacatgcaattaaatgcaaaaatagacaaagataaatttatagaagatgacgaaattcttttaaaaaaacacaatttatacactaaacataatcaacctaatttagtatttaaagtgaataaaggtaattcaaaaataaagggtatgacattaattaaaaacactgatgttaatacaaactttggtgggaaaattgaagggaatattcaagatgttgtacatcatttaggaagtagctataaacaaaagaaattacgcgatgcctatcgtttaatgatatattatgataaagataatcatataaagttatctattatatacaaacatgataaaataaaaaagattgaagtttactcaaaataataattaaagaatggtgattttattggataattaccattctttaattttacataatttaagaaatagactttagaatttgaatggtggtagatattttggataaaatcacttttttaaatgaacttgaacaagagctcgataatttacctagggctgagcgagataaagtgatgtatgaatatgaacaatatttttttgagcaagaaagtgaaggtaaaaatgaatatcaaattattggggctttagaaccacctaaaaaaataggtaaagaaataaatgctagaagtgcaattgtatctgctgaataccggaccaatgctaggacaattttaagagcaatcatggcttcgttaggtatgggcattttatccttagtgattatactgattccaatgatatttgtcggtggatttatgttgatattgttatgtgctgcaatggttttagttataagtccgttactcttaatcatacatggattactgaacagtatgtttagtttggctattagtaattatttatttgcatttgcatttagtggtttaggtattgtcttatttgtaattattgcgaagttggctgaactggtgtatcgattaatattaaaatatttacgctggaatattagaacgattaaaggaagtgcagaagaatgaagaaattatttttgagtggttttagtttgttcattgtctgttttcttctaggatgtataacgtggtttggctttgaaaaacaaaataataaaattaataccatagataaaaacattactgataaatcgatcgactctttaaatataaaagggatatcaactaaagttaatatcacaaaaggtgacaaatttacagtgcgttacaaggggcaaaataaggtagatatcaatcaagaaggtaatgagttaagtgttcatgaaaccaatgaaaaagtagataagtacggtttgaattttaatccctttaggcagatacatgctgaaattaatatcacaatgccaagtgaaaaaatggatgatttgtatgtttctaatagagttaataaagtgaatatacagaacttagatatcgaaagtgctaatttatcaatgcctgaaactggtgcagcacgtgttttcattaagaattcatcaattaaaaaattaatatacagaggtataaaatccacagttcactttaatagcagtgagatcttgaacgcagatataaaaactaaaaatgccagtattatcggaaagcaatctctaattaaagattcggtactatctgcgaaacagggtaatatcaatttaagtgatatggatattgactctgcttttaaagcgtcaacacaacatggggatataaagatgtcgtacaatcaagcaccggataatactttgctgaaattaaacccagaaaaagggaaagccaacgttaataacaaaacttttgcaaatgatagagtaggcgctggtaatcatgtattggaattctatacattaaatggggatatttatataaattaaatgagcgagtgggatagaaatcaaagtatgcaagatttcttaatcccactctttttttccttttgatattaatatgttgcaaaggttaattcggtatcaatttgacctgtgagttcgtttatgttcaaagattcaccattcaaccattgttgaaagtcaatttccacaggtgccttattctcacctaaagtaatatgagcggttagcgattgaggttcatacatacttgtgtgtatcgtgccagaccaacttttaaataatttactgtaaatttcaaattcagggttattaaaaagtttgaaagcatccattttccctaattgagcaggtgtttgtttaattaacctatctaaacgctctgttgattcttttgtataatttctattttcatgcgttaataatttaaagtgatttgtacaagtatgatcataacgcacatcgatggaacgtggtgtaacttcaatgattgcgtggtttaaatatttatccataacaatgtagctaaatgaacttctatgaggtatttcttttaataatttaatagcttcaggaacatctttacagtactgtaatacaagtctgccaatcatgtagcatacaaagccgtcaccgggatgtttacgatgcataaaattataccccattgctaatccagcctcattcatgccatccattctacccgtgacacgagatgttggcccaatttgagctaaaccaccatcattgggttgaaacaataaatagcgaccatcatatgtggcagggtgataatcataattacgtaccatataatcgttacctaaatagacagtgcaaccgctatttttcaaaggtgtaaagcggtaatgggcaaaatttaaaatcatttgacgtgtaggtaaattaagcacttcctgcatacctctgatttcttcccagatttgaggtgcgtaggtttgaaaaatatcataagtctctttgatgtgaatatcaaagcgtggcatacgttttttccattcttgttctctattttttaatagtggtgtatgttgcatccattgtgcagtttgtacacctaggtcgaaatgtgaaccacgatgcgttaaaatatctgattttactttttgcatttcaaaatctcctatgtttaaagtgtagtcttacaaaattgtaactttaatgtaacgtagtgttaattgcattacagggtactagaccttatcattaagaataacaacgacgactgattaaggaattatacttttaatgaggtgattgttaatggctaactattatgatgctattaaagatgcagtatccacttggtggagataaatcaaattacgatgggagtgagcctgatatattcagatcactcttttttgtttaaaccaccttcaatgatagtgatagcgcaaatttctatcaattaagcataatcactggaatgtttatgaatctatatatattaaaagcaaaacaagtttgaattttttcatgttcatgattatgtttaaatgcttataaacgtaatacgcatgtttatctgaatattaaagtagtaagaacctttggtagataacaatttttttatgttttgttgaagcattaatacaataatatcataaaattacgactttcatatgttgatttaaattaatgaaaagtgggtatatatttattgatgtaatcaaatatgctatcattaataatagtgatgttaataatttattgaggtgaaacagaatgtggaattttattaaaggtttatttaaatttgtattcggtacaatcctaactgtatcattagcagcaggcattggtgcagttgtatttgcttatattttcaaaaaagactttgaagatatcgaaagcaaaacaaaagaaattatttcagatatcgaatctaataattaattgattgaaaatgaataggttttttactttgaactgtcgataatgttatcgacagttttttatgctattcatatcgcttgtatgccctatagaatacttgactatgcttaaatatggttggctaactagttatctatcgtgatttttgtaatatcaaaaagggacaatttgattgtgtttgaagtttttaaaaggtatccttctaaaaacatttgcgtcatatctatatttttaattttaacagttatattttctagccatccgtctttataatattcaatatgtacaaaagtatctgaatgtaaggcttgatggagttgtaaattaagttcgtttagctggtcatctgacagtattggacgatcaattttattttgatctattaaatattgttgaatactttcgaattgttcaggtaaagtagcaaagggcgcccatttgaccatgccacggccttgcggtatgttgggattcaactgttctctaggtatttttctataatctgtttcttgattcttgtagtcattcacttattatcactccaatcagtatatatccattatacgaacatacgttctatttttcaagtggttaaatcattatattgtcttttgcccaaaatctttattaaaatatgagtataataatatggaggggtttacatgacgacaacaggttatattggaacatatacaaaaaaagaaggtaaaggggtttaccgattccaactagatgaagaaactggcaagataacggaagttaaaacaggttatgaactagaagcatcaacatatgtaaatcaacataatcattttttatatgctgtaactaaagaaggcgatgattgtggtattgctagtttgaaaatagagtcagatggtacattaagtctgattaacaaatgtctagcgtcaactgctggaaatggttgctatgtatctgcatcaccggatggaaaatatatattcgaagcaatttatggtgctggtttagcaagaatttatgaagcaaatccagaaacaggagaaattgttcgtctaatacaagaattagcgcatgattatccaactggtccttctgaaagacaagagcaaccacatgtccattatctcaacacaacaccagatgaaaaatatgttgtggcaatggatctaggtacagataaagtgattacgtacgaatatggagatgacggtttaaaagtatacgatactatagattttgagcctggagatggcccaagacatattacgttccatgaaaatggaaaacatgcttacgttgtacatgagttatcaaatatcgtaagtactttaaaatatgagaatggtcattttactgaaatcgaaagacatttaacaattccagaaaactttgatggtgatactaaattggcagcagtgagaatatcgcatgatcaaaatttcttatatataagtaatcgcggtcatgatagtcttgctatatttaaagtaggagacgagggtgcaacaatttcattagtagacatcgttaaaagtggtggagaatttccacgtgacttcaatataactgaatctgatgattatttagtttgtgcacaccaagaaggcgattatgctctgaccgtttttaaacgtgataaagttactggaaacatagaaatcgttgataatcaagaaacggcaccagaaggtgtttgtgtacagtttctaagataatatactttgcatttttattatgaatggtgttataatgcagttaacaaatagtgtactaacatgataaacaccgagcccggtagctactacgaatagctatcgggctctttttggtgtattggcactgccgtcgtcagtcacgattattcagccaataagaaaataatgtgacaataacacctactacgataggtgctataaacgttacaaatagtgtaatgcacatgatgtcacctccttccatgctaaaatcagcacagaagtagaacgacgacttttcaattatatcatttgtagcatcttaaccatagaagataaaaggggatgtttgtttaaaattgtcgatgacataaaataggaaagtaatcatgaaatagaaaataatatgcttaagaacatccaggccaatacttaagtagtgactatataacataaatgagagtggaacagaaattataaaataaagatttctgttccactctcattagctacagtttatagcccaagcctataaaaaggtgtttattatttattgaaaaatgttttaatatacttaaattttcctttgtaaggtggaaagagtaggcttgactctaatcgagttgatttaaatatataagatttatcatgactgaatgtgtcaaaactaaatttgccgtgatattgaccaataccggaagcaccaacaccaccgaatggtaagtttggatttgctaattgcatcaatgtatcgttgatagcaccgccaccaaaagaaatttcatttagaacacgttctgttgcgttttcatcttcactgaataggtaaaggctgagtggcttgggtttcgtatgaattaaatcaatcgcttcatcaaaatcgtcataagtaataattggtagtataggaccgaaaatttcaccttccataattttatcattaaatgtaataccatctaataaagtaggtccgatatagttttcagctgaatcagaatggccaccaaaaacaatttccgatttgtgtacacctaataaatcgtttaaacggtcaaaatgcgtttgatttacgatacgtccaaagtcaggacttgcttgtatttctttaccataaaattctgttattgtattttttaaagctttaatcaagtcttctttgactttatggtttacaagaacataatctggagcgacacatgtttggccagcattagtgaatttaccaaaactgatgcgttcactagcgactttgatattagcggtttcgtctacgatgacaggtgatttgccacctaattctaaagtgacaggtgttaaattggtacttgctgcttgataaacaattcttccaacgcgttcgcttccggtgaaaaagatataatcgaagggtaaatgaatcagtgactgtgtagtatcggcgtcaccttggcaaatactgatgtattcagggtcgaacacatcttcaataatattttttacaactgctgacacatgtggcgtgaattccgaaggtttaatgattacagtattgcctgcagctatagcacctataagcggttcaataagcaattggaatggatagttaaatggcccaataattagtactgtgccatatggttctttaacaatataacttttggtaggaaacatataaagcggtgtattaacctgtttctttttagcccagttttttaattctttacgagccgttttgatattttttaaagtaaagccgatttctgttgcataggcttctactttgtttttacctaaatcttcttgaaaagcatttaataatgcatcttcatgatttttaatacttttgcttaggagctttagttgtttttttctgaatttaagatccttggtcgcatgtgtattaaaatattgtttactattatggaaagtttgttctattgaattcaaatgtattcctcctagtacgaatgggtgtccaatatacttatattgataaaaaactggaacatatcaactatgtcccagtataatgaattgtaaaaacttaatatgttgaataaattgtacgaagtgttgtgttaataaagatgtattacttcgttaatgcttctgtaatttgtggtacaacttgttttttacgtgaaacgacacctggtaagaaggcagtattattatcaagtgttacattgaaggcaacgccgactttatctttttcggcgccaacaacaagaattttagaatcactattaataatgtcagtaacaactaatacaaataaatcatatttttcattggcgcttacttcaagcatttctttttctaattcttcttggcgtgcaaatacttcatcaatatctactgtatttacttgaccaatacgtgtaacaaaatctcccatattaaatgattttgcgtccatagataaaatatcagaaacagatttatcttttgtagaagcaccagcttttaacatttctaagccatatgattctaaatcaacattagcaattgattttaatgcttctgcagcttgtacatcttgctcagtacaagtaggtgatttgaataatagactatctgaaataattgcagatatcattaaaccagcaatttcaggtttgatttcaaatccacgttctttatacattttgtataaaattgttgcagtacagccaactggttcagcacggtaatataaaggtgctgcagtttcaaagttagctattctgtgatgatcgacaacgtgttgaacagctgcatcagcaattgaatcagcactttgttggaattcattatggtcaactaaaatgacattttgatcggctaaatcatcatttagtaactctggtgcagttacattaaaatgatctaaagcgtattgtgtttcagggcctacttcgcctaaacggtatgcagtagcctcagcattacctgtttgttgttcaaaatctgccatgataatagcagatgaaattgcatctgtatctggatttttatgtccgaaaatataagtttttgccatatctaaattctccttattttaagtagttaatgttattctagcatgatttcgcattgttattctacttcagcacctagtgaatttttaaaatgatctaatgcccactcgtgacctgaaggattaaaggaagcgacacctctatgtgaaatggaaataccatatcctaagttgtatgcgctaattgcagtatggagtacacaaatatccgtacaaacgccaacgatttctaaatgattaatatttcgctcacgcaacattaagtctaaaggtgtaccgcaaaatgaatcataacgtgttttatctaaatagtggatatgatcgttaaataaaatattttgataaatatcatttactttaccataaagttcacgaccaaatgtaccgatgatattatgtggtggaaacaacttactttcaggatgatatttattttcttcataatgcaaatccatcataaaaaagatatcagattgctttttgttataaacttcgattctttccactatgtagctttcaatttgttgacctggaagtccacaagttaattttccattttcagctacaaaatcatttgaatagtctactacaattaacgcactttttttcatattatggttacactcccaatattaaatataatagtaattatatactaagatgataaatcattaaagatatagtaaacgcgtttaaaaaaacatatttatgttaattattaagtaataacgatgaaaggaactggcctatgattattaatgcaaaacaatttggtttaaaaggggaacacaaatgggcagatacacgtgcaatgcaaaaagcactcaattatgcaaagaaaaataaaggaacaacgatatatgtgcctcaaggagaatatcatattcgcaagccgcttgtgatatatgaggcaacaacattacttttagatgataaagcaattttaaaaagatgcggtaaagatacattattgaaaaacggacgtcgttttaaatcgtattatggttataacggaaatagtcatattcatatagcaggtggcacgtttgatatgaatgggtacgactacccttataataatacgacgatgtgcatgggacatgcatgtgacgttcaaattgtggatgttacttttaaagatgtggttggaggacattgtttggatgcatgtggagtgaacggtttgtacatcaatcaatgcaagttcttaggtttcaatgatccggatggcacaagatttttttctgaagcggtgcagttagatatacaagtttcaggtgcttttccaaaatttggtgcaactgatgggacaattacgaagaatgtcataatagaaaattgctattttggtaattcagaaacacccggtatgcaaccttggaaccgagcaattggttctcatgcaagccgttatcataaatactatgacaatattcatattcgctataatgtttttgaaaatatgaaacaatatgcactcacaccattgaaaaataaaaatacgtatattcaccataatgtttttaaaaattgtgagggcggtatacgctttttagctgtaaaagatgggaaaaatgcgaaagatatgaaaggtaatgaaagggggacacaagcaggaaacaatttaaatattttccaaaatcaatttataggagaaatgcgtaaagaagctatacgtattcaaagttataataatatcaaacatgaaaatatcgttatagcaaaaaatgaatttgatcatgagtcacaaagcgtgtatttaaaggatatcaaacatctttacatatctaacgaagccgatatcagattcaaaaaagtaaatatagattgattatcatttgtaaattgaataataaataatggtgatgtaaacgatttaaaattataaaccaatttgaaatatattatgttatactctaatgaattattgtgaatattctgataataatttaaagggggagcttgatgaataatttaaataaaggggatatgagaaggtcgcagtatttgatgtttttctcaaataaaaaagagaataaatcttataatgttggtcaattagtagggttaattttaggtcctttgctctttgtactaacattgttgttatttcaacctgacaatttatctgataaaggtgtatttgtcttagctatcattatggattgccacttggtggattaccgaagcgattccaattgctgctacaagtttattacctttgatattacttccagttggtcatgtgctcaatccagaagaagtatctgctcaatatggtaatgacattattttcttatttttagggggctttattctagctattgcaatggaaaggtggaatctacatactcgggtagcgctccgaatcattaatacattaggtacgagtacaggaagaatattattaggctttatgatagcaaccggttttttatccatgtttgtttcgaacactgcagcggttatgattatgatacctattggtttagcaattattaaagaagcaaatgaattgaaacacggagatacaaaacctgaaagtatttctaaatttgagcaagcattagtcttagcgataggttatgcgggtacgattggtggtttaggtacattaattggaacaccaccattaattatattaaaggggcaatatcaatcagcttttggtgaagaaattagctttgcaaaatggatgattattggtgtaccaacagtcatcgtcttactgtttttagtttggatatatattcgttacattgcgtttaaacatgatatgaaaacattgccaggtgggcaagatttaattagaaaaaaattaagtgaacttggaaaaatgaaatatgaagagaaagtagtattgattgtatttttacttgctagttttttatggataacacgagaatttttattaaagcattggacattcacttcagaagttgctgatgggacgattgccatgtttatatctgtcttattattcttaattcctgctaaaaataaagaaaagcataaacgtattatagactgggaagtagctaaggatttaccatggggagtattaattttgtttggtggcggtttagcactagcaaaaggtatctcagaaagtggtttagcgaattggctaggagaacaattaaagttaattgaaggtgtcagcccattggttattgtgcttgtaattacaatttttgtcttattcttaactgaaatcacatccaatacagctacagctacaatgatattaccgatcttagccacattatctgtcgcagttaatgtgcacccattgttactcatggttcctgctgctatggcagcaaattgtgcatatatgttaccagtaggaacgcctccgaatgccattgtatttggcactggcaaaatcagtatcaaaaaaatggcatcggttggtttttgggtgaatttattaagtattgtcgtaatcgtgttggttgtatacttcttagtgccacctgttttaggtatagatgttacacaaccattgccattgaaataaaagaagcgtttgtaacaaaactttgttacaaacgcttcttttcatattcaacatgataacaagatgaagttttgctatgaaaacatctaaacagttgtatgggacagttactagcaagaattaattgagtttattaaaggtacctataatcgtgacttgaaagtctaaagtattaagtatctttatcacttttgaaaggtcttcggaaataggtgtgtctgcttgaacgaaaaagtgatacatacctaattgcgtttttaatggacgagattcaatccaagacaagttaatattaaataatacaaacgtatttaatatactggctaatagacctggtttatcaaatttcggtgtaattaataacatcgtgtcggttgcttgttcgatgtgttttggttgattactgacgactaggaaacgagtgacgttatgtggataatcttcaatattttgtgcaattgatgtatagccataagcttcaccgctacctaaaggtgcgattgcaccaacattttgtgaaattttatctaaacttttaattgtactgtctacataagcaatatcaaatccatgcgcttgtatatattggctggtttgactaatagcaggcccaattgagtatactgttgaaatatcatttacggttgcgttttctgaaccatataaagcaaattgtatatctaaatgaagttcactttgtgcatatatattctgttgtgttaatgcgtcggctacgatattaatcgtaccttctattgaattttctataggcacaacagcaatactttgactatcttctgaaacagatgcgacgacttcgtataaattagattttggaacaaattcaatttctgattctgatttatattgtgtcgcagctaaataagaaaatgtgccctttggtcctaaataataaagtttcatgtaatgtaaccccttgtttatctaaatatagtgaatcatttaatggaatggacaacctgagtcttcggtttttttataaaagaaattaggttctttcatcacatttttgtatccgtgatgataattgggcaccaatgtgggagacaaagagggtgctaaccaagaccatttaccagtaacttctctatcgtgtttcgtttcattcatttcgaatctttcaaattgtttagatgctgttaaatgatcgacgatagagacgccagcatttttaaaagaatgatacacagcatcgtttaattcaaccaatgcacgatctttattgaaagaattatttttaagtgtatcaaattcaaatgcttctgcaacactttctaacaaattatagcgatagacatcagtaaaattacgaacggcaatttcatttaccatataccaaccgttaaatggcgcagtaggataagtgatgccaccaatttttaaatccatacttgaaataatagggacggcataccattttaaaccgagttgttgcagtttggggaatctgtcatgtgtaatagatacttctttaattaaatttttagggtattcatgatattttattttgctattcggcattttgtaaattaagggcaaaatatcaaaatgtgtatactgaccttgccatccaagatgttgtgctaatttggtaatctttttctcagctggatctccacatgtttcgtaccctgcgtatctaattaattgattgttataaatttgcggggggttatcttttgagaaaattgtgatgtaaggtttgattcttccattattagtcgcaatgtcaatatggttttcaattgcttctataaattcatcttcactttgtatgtgtcttgcatcagacacagttaaagaatcccaaaaaaatcgtccgatacaacgattggaatttctccatgccattttggctccataattcaattcttcaaatgtatgctcataagtgccagtagaaaggatagctgactcaatttcagcaattcgttctgttattttatttttatcataatttaattcattatacatggtttctataaaagacttagcttcatttagcattaaaaacacctcataaatattatatatcatttttaaatttataaaatgataaaacatataactgtcatgactttgtcgttaaccatgtcacattttaaacaaattttaaataaataactgatatctttacttctattttgaattcgtaaatcagtcctatttaaagtgctaacaatacttcatttatgctaaaatgatggaaaagctgattggagagatggttgtgtaccaatatgaagatgatacattagtgttgcataatgatttatatcaaataaatatggcagaaagttattgggatgatgggatccatgagcgtatggcagtgtttgatctatattttagaagtatgccattcgatagtgggtatgcagtgtttaatggattaaaacgtgttatcgaatatattaatagttttcatttttcaaagtcagatattgaatatttaaaatcaatagggtatcaagacgacttcttaaattatttgaaaaacttgagttttactggaagcatacgttcaatgcaagaaggagaactttgctttggaaatgagccattgcttagagtagaagcaccactcatccaagctcaattgatagaaacaatgcttttaaatattgttaattttcatacattaattacgacaaaagcaagcagaattagacaagttgcacatgatgatatgttaatggaatttggtacgcgccgagcgcaagaagcagatgcagcattgtggggagctagagctgcatatataggaggctttaactcaactagtaatgtacgcgctggtaagttatttgggatacctgtttcagggacgcatgcgcatgcgatggttcaaacatatggtgatgaatacatagcattcaaaaagtatgctgagagacatcaagattgtgtgtttctagtagataccttccatacattaaaatctggtgtgccaacagcgattaaagttgctaaagaattaggcgataagattaattttgttggtattcgactagattcaggtgatattgcctacctctcaaaagaagcacgacgtatgttagacgaagcaggatttactgatgcaaaaattattgcatctaatgacttagatgaacaaacgattacgagtttaaaatcgcagggcgctagagtagactcttggggtgtaggaactaaattaatcacgggttacgatcaaccagcattaggtgctgtttataaactcgttgctgtagaagacagtgatggatcatacgttgaccgcattaagttatcaaataatgcagaaaaagtaacgacaccaggtaagaaaaaggtgtatcgcataattaataaaaaaacgaataaggcagaaggagattacattactttagaacatgaagatccatacgatgaatcgcctttgaaattattccacccagtacacacatataaaatgaaattcataaaatcatttattgctaaagacttacatcatgacatcttcatagatggagaacttgtatatgatttaccaaatgaaaatgaagcacaagcctatttgaaagatagtctcgcatatttatgggacgagaataaacgtcacttaaacccacaggaatatccggttgatttaagtacgttatgttgggaaaataaacacaaacgtatctttgaagttgcagaacatgttaaagagatggaggaagaaaatgagtaatttacaagatatagttgtgaaagaaatgaaagtgaaaccatcggttgaaagtaaaagtgaaacacgacatattatccaatttataaaaaactatgttcaatcgcattcgtttattaaatctttaacactaggtatttctggtggtcaagattcaactttagcaggtaaattatgtcaattagcagtaaacgaactgaaagaggacggcaatgattgtgaatttatagctgttaaactcccttatggtgagcaaaaagatgctgcagaagtagaagatgcgttaacttatatccaaccagacaaaattataactgtaaatattaaaccagctgtggatcaaagtattcagtcgttgaaagaagctggtgtgaatctaacagattttcaaaaaggcaatgaaaaagcaagagaacggatgaaagttcaattttctattgcttctaaacaaaaagggattgtcgttggtacagatcattccgctgaaaatgtcacaggcttttacacaaaatatggagatggggctgcagacattgcacctttatttggtttgaataagcgccagggtaaacagctcttagcgtatttagcagcgcctaagcatttgtatgaaaaaacgccaaccgctgatttggaagatgacaaaccacaattgcctgatgaagaagcattgggtgtaagttatgatgatattgatgattatctagaaggcaaatctgtatcaagtgaatctaaagaaataatagaaaatcattatataaaaaatgcgcataaacgagaattagcttatacaagatacacatggcctaaaaattaatttaattccgataactttttagtgacaaacgaaatcatagttgataaaattacttgaatttaatgtaagagaaaggaaaatggtcatgtcagtaataacatctaatccatggttaatggttttagcaatttttattataaacgttgcttatgtgacgtgtcttacaatgagaacaatcttaacacttaaaggatatcgctatgtagctgctattgtcagtttcttagaagtacttgtatatgttgttggattaggtatggtcatgtctagtttagatcaaattcaaaatgtgttcgcatacgcttttggattttcaattggtatcatagtaggcatgaagatagaagaaaaacttgcgcttggctacacagttgtaaatgtgacatcatcagaatacgagttagacttaccgagacaattaagagatttaggttatggtgtaacccacaatacagcatatggtcgagatggcaaacgcttaatattacaaattttaacgccaagacgtttcgaatttaaattaattgataccattaagcaaatcgatgaaaaagcatttattgtggcatatgaaccacgtcaaatacacggtggtttctgggcgaaaggtgttagaagtaaaaaacttaagcaatacgatacggatgaagttgaaagtatatgaaaaaacagcaaaaatttaaagtcgcagataacgagacgattcaagattgcttacaacgtatgcgtgaagcggggtatgcgccggtcaaacggttcgaaaagccaatttataaagagaataaagatggcagtttagaagtattgaagcaagaaattgaatttgtaggaaaaatgatagagcaataatttatgaaccgttatggatcatcgtatccgtagcggttatttttggaatgtgtaaatattttataaagatgacttaaaagccttatactttttaatataattctgttaaactattactgaaaaggtaaacacgaacttttagtctgaattatttattaatgtacatgttttaatggaatcaaactaaatttatgtatgataggagcttatttcaatgattgaacgttattctagagaagaaatgtctaatatttggacggatcaaaatcgctatgaggcatggttagaggtagagatacttgcatgtgaagcatggagcaaattaggtgatattccagctgaagatgttaagaaaatacgtgaaaatgctaaagtagacgtcgctcgcgcacaagaaattgaacaagaaacacgtcatgatgtagttgcgtttacaagacaagtttctgaaacattaggtgaagagcgcaagtgggtccattatggtttaacttcaacagatgtagttgatactgcattaagttacgtcatcaaacaagcaaatgaaattattgaaaaagacttggaacgttttattgatgtattagcacaaaaagcgaaagactataaatatactttgatgatgggacgtacacacggtgttcatgctgaaccaactactttcggtgtgaaaatggccttatggtatacagaaatgaaacgtaatttagaacgttttaaacaagtaagaaaagagattgaagttggtaaaatgagcggggcagttggtacatttgcgaacattcctccagaaattgaagcctatgtgtgtgagcatttaggattagatgccgcaccagtgtctacgcagacactacaacgtgatcgtcacgcatattatgttgcaacattagctttaattagcacttcaatggaaaaatttgctgtagaaattcgtaatttacaaaaaacagaaacacgtgaagtagaagaagcatttgcaaaaggtcaaaaaggttcatctgccatgccacataaacgtaatccgattggttcagaaaatatcactggtattgcacgtgtaatcagaggatacgttacaacagcatatgaaaacgtgccattatggcatgaaagagatatttctcattcatctgcagaacgaattatgttaccagatgtaaccattgcattagattatggactgaataggtttacaaatattgtagaaagactaactgtcttcgaagataatatgttagcgaatatagataaaacatttggtttaatatactctcaacgcgtattattagcattgattaacaaaggtttggcacgtgaagctgcatatgataaagtacaaccaaaggctatggaatcttgggaaacaaaaacaccatttagaactttaattgaagaagatgcaacaattacagacttactaacaaaagaagatttagatgagtgtttcaatccaaagcatcatctaaatcaagtggatacaattttccaaagagctggtttagaataataaaatttttcaagtgaaatcgttacactttaatgtactaatacgttaaaataagattatattgaaaaatacaggggttgttttaaatgcaaatagaaaaacttagaggaaaagcattagatgaactgttcgatgcaatattgacacttgaaaatagagaagagtgttatgaattctttgatgatttatgtacagtgaacgaaatccaatcattatcacaacgattacaagttgcaaaaatgattaaacaaggttacacatatgcaaccatcgaacaagaatcaggtgcatcaacagcgacaatttctcgtgtgaagagatcactacaatggggtaatgatgcttacacgatgattcttgatcgtatgaatatagaaacggccgattaatgatttaaaccataaattttatcgaatgacgactaggtatagtaaccaaagtcgtcatttttttatactaatgatggatttgattttaaaatatgagatattataacgatgtgattgtctggcattttgtattatttttgcggtttataacattgaagaagggtaatgaaatatgtagcagacatttatgaaaatgggattccattttaaaataggcgatggtttttatagaatgaaaggaagagatctatgtcaaaaaaagtgatgctttttctgttcactttagtatgtttatgtcttattgttatttttattatgattctatcagctaataattttaaaccaactaatgacaatattgttaaacccaagaatgccttaccactcaaatatgaaaacaatggtgtaacttatgtcaatggtcatgtcattgtgaataaacaacttgcacttccggcgaaatataaaccaggcgaaaataaaatagctaaaaagcaactaaacaaattattgaagcaagcagaaaaaagaaatttagatttgaccatgacaagtggatatagaaattttgagaatcaagaaaaagtggtagatacttttgttgagaaggatggtaagcaaaagacaactaaatatgctgctaaacctggacattttgaacaccaaacaggtttagcatttgatgtaggaacaagccaaccattaaatgattttcatacagattttgaaaaaactaaagaagcacaatggttagctaaacatgcagccaattatggttttattattaggtatcctaagaaccaatcaaaacaaactggctatgcttatgaaccatggcatttaaggtatgtaggacctcaattggcaaaaacaatcaatgagaaaaatacaaatttagaaagctattaccatcttaataagtaatatcaagatgatgcaaaatcacctcagaaatttggggtgattttttcttcagtattttagaactcgagacataaaaatgatataatcatatgtatgctaaaagaaggagaaacatatcatgactgacatgaataagtggagacatatttttaaattggaccccgcaaagcccatcagtgacgaagatttaatgaaaatttgtacatcagatacggacgcaattatgattggtggaacggatgacatcactgaagaaaatgttgcgcacttaatgcataaagttaaatgttattcattaccaatagtacttgaaatatctaatcttgaaagtgttgtacctggctttgacttatattttattccaactgttttaaacagtagagatgtaaaataccataatggtttattactagaagcgttaaagtcatatggtacattgatagattttaatgaagttgtgttcgaaggatatgtggtacttaatccagattgcaaggtagccaaattaacgcaagctgacacgatgatagatgatgaagatattgaagcttatgcacaaatgatcaatgatatgtatcaattaccagttatgtatatagagtatagtggtgtgtatggcgaaactaacttggtaaaggcagcagcagacatgttaacggaaacacaattattttatggtggcggtattagtaactacgaagaagcagaaatgatggcttctattgcagatacaatcattgtcggaaatattatatacgaagatataaacaaagcactaaaaacagttaaagtaaaggagacacattaatgaatgcattagtaaacaagatgaatgatgaacagagtcaagcagtacgtacgacagaggggccactactaattatggcaggtgccggctcaggtaaaacacgtgtgttaacccatcgtatcgcatacttgctagatgaaaaagacgtgtctccgtataacgtcttagcgattacttttactaataaagcagcaaaagaaatgaaagcacgtgttgaaacattagttggagaacaagctcaggtattgtggatgtctacattccactcaatgtgcgtgaggattttgagaagagatgcagaccgtattggtatagaacgtaactttacaattattgatccaactgaccaaaaatcagtgattaaagatgtactgaaaaatgaaaatatagatagtaaaaaattcgaacctagaatgtttatcggggcgataagtaaccttaaaaatgaattgaaaacacctgaggatgcacaaaaagaagcaaatgactatcatgaacaaatggttgcaaccgtttataaaggttatcaaagacaattatctagaaatgaagcacttgattttgatgatttgatcatggtgacgattcgattattcgaacgtgtaccagatgtattagattattatcaaaataaatttcaatacattcatgtcgatgaatatcaagatacgaataaagcacaatatactttagttaaattacttgccgctaaatttaaaaatttatgcgttgttggagattcagatcaatcaatttatggttggcgtggtgcagatatccaaaatattctttcttttgaagaagattatccagaagccaaaacgattttcttagaacaaaattatcgttctacaaaaaatatattaaatgcagcgaatgaagtcattaaaaataattcagaacgtaaaccgaaagggttatggactggtaatacgagtggcgataaaattcattactatgaagctacgactgagcgagatgaagctgaatacgtcgtgcgtgaaattatgaaacaccaaagaaatggtaaaaagtatcaagatatggccattttatatcgtacaaacgcacaatcacgtgtacttgaagaaacatttatgaaatcgaacttaccgtatactatggttggtggtcaaaagttctatgacagaaaagaaattaaagacttattaagttacttacgtattattgcaaatagtaatgatgacattagtttacgtcgagtaatcaatattcctaaacgcggcatcggtccatcatctgtagataaaattcaagcatatgcggcacaaaatgatttaagtatgtttgatgcattagcagaggttgattttataggactatctaaaaaagtgacgcaagaatgtattagtttttatgatgttatgcaaaatttaattaaacaacaagaatttcttgaaattacagagattgtagaagaagtattgactaagacaggctatagagacatgttagaacgtgaacaaacgctcgaatctagaagtagattagaaaatatcgatgaatttatgtctgtacctaaagattatgaagaaaacacacccttagaagagcaatcgctaattaactttttaactgatttatcactggttgctgatattgatgatgctcaaattgaagatggtattacgctcatgacgatgcactctgccaaaggtcttgagtttccaattgtatttataatgggtatggaagaatctttattcccacatatcagagcgattaagagtgatgatgaacatgaaatgcaggaagaaagacgtatttgttacgttgcaataacacgtgctgaggagaccttatacttaacacatgcaacatctagaatgttatttggtcgtcctcaatccaatatgccttcgagatttttaagagaaattcctgaagatttattggaaaatgaatctaaaggtaaatcaaaatctcaagcacaggcaacgagcaatcgtttccagaatgctaccaaacaacctgctaaacgagcgcatagccaacgtgctactgcaacaaaacaaaagcaatcagctaccaattggaatgttggtgataaagtaatgcataagtcatggggcgaaggcatggtaagtaatgtaaaagaaaaaaatggttctgtcgaattagatattatctttaaatctgaaggaccaaaacgcttgctagcacaatttgcacctattgaaaaaaagggggagtaacaagtggctgatatacaatcgcgtgtagatgagttgcatagattattaaatcaatatagctatgagtactatgtgaaagataatccatcagtacctgatagtgagtatgataaattactccatgaattgatagatatagaaacgcaacatccagaatatcgtactgcggattcacctacagttagagtaggtggtagtgcgcagtccacattcgaaaaagtgaatcatgatacgcctatgcttagtttaggtaatgcgtttaacgaagaagatttaagaaaatttgatcagcgtatacgtgataatataggaaatgttgagtacatgtgtgaattgaaaattgatggacttgcagtttcattaaaatatgagaacggtcgatttgttcaaggtttaactcgtggggatggcaccacgggcgaagacattactgaaaatttaaagacaatacacgcgataccattaaaaattaatgaaagtagaacttttgaagtcagaggcgaagcgtatatgcctagaaagtcttttgttaatttaaatgaagcgaaagctgcgaatgaagaacagccatttgctaatccaagaaatgcagcggctggttcattacgacaattagattcaaagttagctgccaaacgtaaactgagcgttttcttatatagtgtgaatgattttacccagtttaatgcagatactcaaagtgaagcattagatgaacttgaccaactaggctttaaaacaaaccaagaacgtcaacgcgttcaaacgatagaagaagttatgacttacattgacaaatggacaaaacaacgtgaaaacttgccttatgatattgatggtattgttattaaagtcaatgctttagaacaacaggaaacattaggcttcactcaaaaatcaccgcgctgggctattgcatataaatttcccgctgaagaagtggttacggaattattagatattgaattgagtatcggtagaacaggtgttgttacacccacagctgttcttgaaccagttagggtagcaggtacaaccgtttctcgcgcttcactacataatgaagatttaatccatgataaggatataagaataggtgatagcgttgtaattaaaaaagcaggcgacatcatacctgaagtaattaaaagtgtattagacagacgacctgatgatgcagaaatctatcacatgccttcacattgtcctagttgtgaacatgaattagttagaatagaaggcgaagtggcattacgttgtattaaccctaaatgccaagcgcaattagtagaaggattaattcactttgtttcacgacaagcgatgaatatagatggcttaggaactaaaataatccaacagttatatgaaaatgagaaaataaaagatgtagcagatattttctatttgacgaaagaagatcttttaccactggaccgtatgggcgagaaaaaagtagataatttactcaatgctattgaaaaagctaaatcgaattcattagaacaattattatttggtcttggtattcgacatttaggcgttaaagctagccaagtgattgctgaaaaatatggaacgatagatgaactgtttcatgtgacggaagaagcgttaatggatattcatgatgtggggcataagctagctcaatctgtagtaacttatttagaaaatgaagatatacgtgcattaattgataaattaaaagcaaaaaatgttaatatgatttataaaggtgttaagacaacagaattagaaggacacccagattttaaagacaaaacaattgtcctaactggtaagttatatcaaatgacaagaaatgaagcatccaattggttagcattacaaggtgcaaaagtaaccaatagcgtaacaaaaaataccgatttggtcatagcaggtgaagatgctggttctaaactagctaaagcagaaaaatttggtacagaaatttggtcagaagaagcttttgttcagaaacaaaatgaaatagagggatagaggagattatacatgaaacgaacgattatactattcatctcagcaattttggtattaacagcttgtggaaataatgatgaaaaatcaaaagaacaatctaatgaaaaagagcaacaaaaagagtcaggttccgtaaaagaaattgcaacggataaaaatgtgcaaggtgataattatagaacgattttaccatttaaggagagccaagcacgtggattattacaagataacatggcgaacagttacaatggtgaagactttgaaaatggtttgttagatttaagtaaaagtgtatttccaacggatgactacttatatcaagatggacaatacttagataaagatatgattaacgcttttctaaatccaaagtatactaaagatgaagttaacaaaatggatgaaagtgatagaaaagagaaaaaagcaaatgaaaacttgggactaaatccatctcacaaaggtgaaacagatcctgaaaaaattgctgaacaatcacctgcatatttatctaatattttagaacaagatttttatgcgagtggtgatacaaaaggtaaaaaaataaaaggtatgacaataggtttagctatgaatagtacatattattatcaaaaagaaaaagacggtgaaacctatagcaaagacctcgacgataaagaaattgaaaaacaaggtaaacaaatggcagaagaattactttctcgaattcgggaaaataaggatttgaaagaaatacctatacattttgctatttataaacaatctggtgaaaattcaattgttccaggtgagtttattgcagggacaacggttgaagatggtaagacacgtattaatgattggaaagatattaatcaaaaaacagccttattaccttctgaagaagcgggagagcttgatgaaaatttaaattccgatttcaaacaatttaatgacaacctacaaacctattttaataatttcacacaagcagtgggtacagttaaatttgataataaaaaagcgaaacaactatccgttgatttacctatagattattacggtaaagcagaaacgattggtatcactcaatatgtaacagaacaagctgataaatattttgatggtattgatgaatatgaaattcatattaaagatggtaataatccgaaagcacttataagtaaaacgaaagacgacaaagaaccacaagttcatatttataaaaacaacaattaaccgaaacaattaaccaagataatgacaatcttgcatagacaaaaaataacgctaaactgatatcaattataatgatataccagtttggcgttttgtattgatttaacagttataatatcaaactattcctttacgatttgttttactttatctaggtcatgtgtcacaaatgaaccaggttttttagtgtatttactaacaaagtaagtagtaatcacacttgctaagaatccaggaataatttcatacataccaaatagctcattgatagaagctaatggtttaatccaaacaatccaaataattacgaccaatgcgccggtaatcatgcctgcaagtgcaccagtacgtgatagacctttccaatagagtgagaagataactaatggactaaatgcggcaccaaatcctgcccaagcattaccaactaaatttagtatcgtatcgtttggcgaccaagcaatccatatagccacaatcgctacaattaatacagataaacgaccaaccattaagaattctttctcgtgtgctttagctttatcttcaccacgaatgagtttataaaagtcttccgttaaggaacttgaagttaccagtaattgtgaagaaattgtactcatgatggctgccaaaattgctgccaataagaagcctccaactaaagggtggaataaaatttggctcataacgataaataaagtttcaggatcctctaacttgatgttgcgttcagaaataaaggcaatacctgttaaaccaactgcaacagcacctaataacccaatcaccatccagctaatacctaatcttcgtgcttttggtaataatttgtgcgattttatagacataaatctaacaataatatgaggttgtccgaaataacccaatccccaagcaaacagtgaaatgatacctaaaacggttgtgcctttaaatagattcatatttgttggtttcatctctgctacttgtttaaacgtatcgatgccgtttaaatcgataagtgcaacgatagggaccatcaccatagcgattaacatgatcactccttggaagaagtcggtgatagatacagcaagataaccaccgaaaaatgtataaaatatgactataaatgcaaccattagtaatccccaatgataattcaaaccgaaggcactttcgaataatttaccacctgatacaaaaccggaatgtgtgtataaagtgaaaaaaacaacaataattaagccggatataatttttatgtaattattgtggtcatttaatctgtttttaaagaaatctggtaatgtaatcgcatcaccagccaattctgtatagacacgtagacgaggtgcaacgacaaaataatttacataggcgcctaatgaaagaccaatggtaatccacatagcagataacccagtactataaacagatcctggtagacccataatcatccagccactcatatctgatgcacctgctgaaagtgctgtcacataaggaccgatgctcctaccacctaacataaattcacttaaattacctgtagcttgtttgtatccgtagtaaccgataaataataatatagtgaaatatatgatgatcattatatatgtttgccaacttgcatgtacttggttggccaatgaagtgcctaatatcagcatcgtcctcatctccctttgttttaatgattctattgtggtatatgaattattatacaatgtaatttataaatagaatagtattattttagtttaatgaaaaaatacattttagccatgctttgttaagcgcttccatataatgatgtatagttacatgaaatataaagtgcaatgattgattatgcatttaaaaaaataaatcgtgcgtgatttaggtggtgaaatttaaacaatgccatttttaacgtatgaatgacaagtaaataatagcaatataaaattttaatttaccgttattattgaaaaacttagatttttcaacgaaattttggtacaattttgtaatgaatgagtaaaaaggaggcttttatttaatggctaaagttacacgagaagaagttgaacatatagcaaatttagcaagacttcaaattactgaagatgaaacgactgaaatgcaaaatacattagaaagcattttaaactttgctaatcaaatagatacagcggatactagtgaaattgaaccaacatatcacgtactagatttacaaaatgtattacgtgaagataaagcaatcgagggcatccctcaagagcttgcattaaaaaatgctaaagagacggaagatggacagtttaaagtaccatctatcatgaatgaggaggacgcttaagatgaccatccgttatgaatctgttgagaatttgatcaacttaatcaaaaacaaagaaattacaccatctaaagttgtaagtgatatttacgatgcaattgaagaaactgatccaacgatcaaatcgtttcttgcattagataaagaaaatgctattaaaaaagcacaagaattagatgaattacaagcaaaagaccaaatggaaggcaagttatttggtattccaatgggtattaaagataacattattactgaaggtgtagaaacaacatgtgctagtaaaatgttagagggctttgtaccaatttatgaatcaactgtgatgaataaattacgaaatgaacaagcagtgcttattggtaaattaaatatggatgaatttgctatgggtggttccactgaaacatcatattacaaaaaaactgtaaatcctttcgatcatactgcagtacctggtggttcttcgggtggttctgccgcagcagttgcagctggtttagttcctttcagtttaggttctgatactggtggctcaattcgtcaaccagcagcttattgtggaattgtcggtttgaaaccaacatatggccgtgtatcacgttttggtctagtagcctttgcatcgtcattagatcaaattggaccattgacacgtacagttaaagacaatgcattagtcttggaagcaattactggggtagacgaaaatgattcaacaagtgcgccagttgaagatgctgattacacttctgatatcggtaaagatattaaaggattgaaaatcgcgcttccaagtgagtatttaggtgaaggtgtttctgatgaagtcaaagcatctgtaaaagaagcagtcgaaactttaagaggtcttggtgccactgtagaagaagtatcattaccgaatacgaagtatgggattccttcttattatgtaattgcatcttctgaagcttcttctaacttgtctcgtttcgatggtattagatatggatatcattctccagaagcgaactcattagaagaattatataaaatgtctagaagtgagggctttggtgaggaagttaaacgccgtatcttcttgggaacatttgcattaagttcaggttattatgatgcattttataaaaaatcacaaaaagttagaacattaatcaaagatgatttcaatcgtatatttgaaaattatgatgttgtcgttggtccaactacacctacaacagctttcaatttaggtgacgaaatagatgatccacttacaatgtatgcgaacgatttattaacaacgccagttaatttagctggtttaccaggtatttctgttccttgtggacaatcaaatggccgcccaatcggtttacaatttataggtaaaccatttgatgaaaaaacactatatcgtgtcgcttaccaatatgaaacaaaatttaattttcataatgaatacgaaaaactataaggagtggaaatcatgcattttgaaacagttatcggactagaagtccacgttgagttaaaaacagattctaaaatgttttctccagcgccagcgcattttggagcaaaaccgaactcaaacacaaatgttatcgacctagcatatccaggtgtattaccagttgtaaacagacgtgctgttgattgggccatgagagcttcaatggcattgaacatggaaattgctacagaatctaaatttgaccgtaaaaactatttttatccagataatccaaaagcttatcaaatttcacaatttgatcaaccaattggtgaaaatggttatatcgatatcgaggttgatggtgaaacaaaacgcattggtattacgcgtttacacatggaagaagatgctggtaaatcaacacataaagatggttattctttagttgatttaaatagacaaggtacaccattaattgaaatcgtatcggaaccagatattcgctctcctcaagaagcatacgcatacctagaaaaactacgttcaatcattcaatatacaggcgtttcagattgtaagatggaagaaggttcattacgttgtgatgccaacatttcattacgtccgtatggtcaagaagaatttggtacaaaagctgagttgaaaaacttaaactcctttacatatgttcgtaaaggtcttgaatacgaagaaaaacgtcaagaagaagaattgttaaatggtggagaaattttacaagaaacacgtcgatttgacgagtctaatggtaagacattattaatgcgtgttaaagaaggatctgacgattaccgttatttcccagaaccagatattgtacctttatatgtagatgaagaatggaaagaacgcgttcgtcaaacgattcctgaattacctgatgaaagaaaagaaaagtatgtaaatcaatatggtttacctgcctacgatgcacacgtacttacactgacaaaagaaatgtctgatttcttcgaaggtgcagttgcagaaggtgcagatgttaaattgacatctaactggttaatgggtggcgtaaacgaatatctaaataaaaatcaaattgatttattagatactaagttaacgccagaaaacttagcgggtatgattaaattaattgaagatggcacaatgagtagtaaaatagctaaaaaagtattccctgaactagctgaaaatggcggggatgcaaaacaaattatggaagataaaggcttagtgcagatttctgacgaagcaacattgcttaaatttgtaaatgaagcattggataataacgagcaatctattgaagactataagaatggtaaaggtaaggctatgggcttcttagttggacaaattatgaaagcttctaaaggccaagctaatccacagttagttaaccaattgttaaaacaagaattggataaacgataattcaatatatctagaccctgtagctcaaattatgctacagggtcttttaaatgcgatgtgccttaaatattttctttggaatttaacctaaaatgcttttaacatctatgtaaatcatataatataggtattgagtatatgaagtagagggataaattatgagaaaaagagctagaatcatttataatccaacatctggaaaggaattatttaaacgcacattaccagatgttttaattaaattagaaaaagctggatttgaaacaagcgcatatgccacagaaaaagtaggcgacgcaactacagaagcagcacgtagtttagaacaaaattacgatgtactgattgcagctggtggagatggtactttaaatgaagtcataaatggcattgctgaaaagccaaatagaccaagtttaggtattataccgatgggcactgtgaatgattttggtcgtgcattacatttacccacagatatcatgagtgcgatagatgtcattattgagggacatatgacacgtgtggatattggtaagatgaatagtcgttattttattaacttagctgcaggtggacaactaactcaagtatcatacgaaactccgagtaagttgaaatccattgtaggaccattcgcgtattatatcaaaggttttgaaatgttacctcaaatgaaagccgtggatattcgtattgaatatgatgacgaagtattccaaggagaagccttgttattcttactagggcttacgaattcaatggctgggtttgaaaaattagtccccgatgctaaattggatgatggttactttacattaattatcgttgaaaaagctaacttagctgaattaggccacattatgacgttagcatcaagaggtgaacataccaagcatcctaaagtacattacaagaaggccaaatctattagcgtttcatcattcaccgatatgcaattaaatgtagatggtgaatatggaggcaaattacctggtaattttttaaacttgaaacaacatattgaagtattcacaccaaatgatattaaaaatgaagaaattatagaacaatgatacaaataaaaatacgatttagattaaactacgaggttaggtcagtcaacatacatcctaacctcttttaatgtggggtgaagtaatgaatgcgatacaaaaaaatgaagtaattgaaggaacagtgatagatttaacacatgaaggtcatggtgttgtgaaatttgatcgttatccaatttttgtgcccaatgcactcattaatgaagtgatagcgtttaaagtaatcaaagtgaaaaagaacttcgcaattggtaagctggttgaaattaaagaaaaaagcactgatcgagtagaaccaccgtgtatatattattataaatgtggtggttgtcagttgcagcacatgacatatcaagcgcagttaaatatgaaaaaagaacaagttgtgaatttatttcaacgtaaagctggatttaaagatacaatcattcatgacacgattggtatggaaaatccttggtactacagaaataaatcacaaattccagtgggtaaaaacaatgagaataaagttataacaggattttatcgtcaacgtagccacgatattattaatatggatgaatgtttgattcaagaccaactacaccaagaagttataaataaattaaaagcgtggttcaatgaactaaacatcagtgtttataatgagcgtaaaaagcaaggcatgatgcgtcatgttgtaataagaacagggcatcattctagagaactcatggtcatttttgtaacaaatggcaaaaaatttaaacaaggtgacatcctaacagaacgtttaaaacaacattttccagcaattgtgagtattaaacaaaatgtaaatgatacacattccaacgttataatgggacaaaattcatatacactttatggtaaagatgagattgtcgatatgttgtcagatgtcacatttagaattaatgaccaatcattttatcaaattaattctatccaaacagaaaaactatatcaacgtgctatagattatgctgagctacagggagaagaaacagtgttggatacttattgcggtattggtaccattggtttatatatggctcccaaagcaaaacatgtctatggtgttgaggttgtgccagaagccattacagatgctcaacaaaatgcgactataaaccaatttgaaaatactacttttgtctgtggtaaggcagaagaagttatcttaaaatggaaatcagaaggaataagaccagatgttgtaatggttgatccacctagaaagggttgtgacgaaacatttttgaagacattattagagctaaatcctcaaaaaattgtctacatatcatgtaacccatcaacgcaacagcgtgatgcacaattattagcaaaccaatataagttaacacaaattacaccggttgatatgtttccgcatacgacacatgttgaaacagtggcacaatttgaacgtatataaagcattgatgtaaagactgtattacttataattaaatacgttttgtatatatgacttgtgtaaaaataattaataatttgtttgctaaacattgcaaaatattgcaaaatgagtaagtttgttaaaattcaattacaagcaacttactttcactttaccccctttcatagtggtgataatcgttgtatactctagttaataacgagtgacgaggagggcgtctaatgtttaaaattgatttgttttctaataaaaaagcagttgaaggttttattttatttcaattaactattgtgatgattagcattttgatttcttataaaatggcatattctatgacccatattatagaacaaaacataatttttaatattatttttggtattgttggttttgcagtagtgtatttcttacatgaatttattcataatataatgttcagagtaatgtcaaaaggtaataaacctacatatcgtattaaatcaggtttgattacaacacatatgccaaatgtttattttaaaaaatggcaatacatgacaattatgttagcccctttagtcattatcacaagcgtattattagtaatattttcgtattttgcttactcatctattatctttattgcatgttttcacataggatattgcgtaatggatatgtatttccttacaggtttattaaataaacatgtacaacttattgaagatacagaagaagggattaaattttatacacaagcgcctgcccctgctcaagaatttcgaactgaattgaaatcataaaatgataaatgtaactttgataaaggatcagctccgtttgagtaaatgatcatttgaatattaaattcaaactgattcacttaaacgtgtactgttccttttttttattgagcaaattcaaagaaaaatgatgatggaggatgtaagataaaaacaacacaattataaattatatcgaatacaggaggtgagggcattgtcagaaagacggattatacatgtggatatggactactttttcgcacaagtagaaatgagggataaccctaaactaaaaggaaaacctgtcattgttggtggtaaagctagtggaagaggggtcgtatcaacggcatcatatgaggcaagacaatatggtgtacattctgcgatgcccactgcacaagcgcataaattatgtcctaacgggtactatgtgacgccaagattcgaagcttataaaactgcatcggaaaagattatgaatatatttaaaagttatacagaggttgttgaacctttgtctttggatgaagcatatttggatatcacacatcttgtcagacctgatttaccagcctctcgaatcgctcaatatatcaggagagatatttatgaagctacaatgcttacttcgtcagcaggtgtatcatataataaatttttagctaaattagcaagtggtatgaacaagcccaacggtttaacagttattgactatagaaatgttcatgatattttaatgggcttagatattggagattttcctggtgttggtaaagcttcaaaacaaaaaatgcatcaagaagcgatttatacaggacaagatttatataatcaaagtgaacgggaccttattagactatttggtaagcgtggacatggcttgtacaataaagcgaggggtatagatcataatccagtaaagcctactagaatcaggaaatctgttggtacagaacgaacatttgccacagatatgaatgatgatgaagaaattttacaaaaaatttgggaattaagtaataaaacagcagaacgtctagctaaattacaaaaatctggaaaaacagtaacagtaaaaattaaaacatttaagtttgaatctttgtcgaaacaacgtagtcttagagacccggttcgctcagaaactgacatatacaatattgcttatgatttatatacagaattaaaaaatcctgaaacgcctattcgtcttgtaggggtgactgttggtaatcttgaaaaagcgacatatgaaaatatgacaatatacgattatatttaattaagatagaaaatgatttatagtagataagctattttacagacatatcaaggaaatagaattaatctttatcttttaaatccttgccgtagatatttaacatactaggtaaatcatcataatgttttaagagacggaacgtaatcatagcgcatgctttagcatcattgagcgcatcatgatgtccatgaaaatctaaattataatattgcatcatgtaatttaaaccatagcgatgattttctactgttcttcttgaaagttgtaaagagcaaaagtaagtcatgttaggggtatcaaaaccaaaagcactaatactttcgtgtagaacgttcatatcaaatgctgcattgtgtgcaacgacgggtaaatcgccgataaattgcaacatatagggatatactgtttgaaatgtaggcgcatcttcaacttgttcaggatgtatgctgtgtactgcgatattttgttgtgagaaatagtcattagggttaacaagtgtatagaaagattctgttatctggtggttgactactttaaccataccaacagcacaaatacttgtacgtttaccgttggcagtttcaaaatctaaagctataaatgcatcgttactcatggagcaagttccctttctataatggaatatgttatgactttatagaataaatgaaaaacagtcaagttaatgaaattgaactaacatttactacctaatcaaaaaagtctgggacatttattgatgtcccagacttttctgatatataaattcgtgagtattacctattaattattctgattcatcaaatgaacgtgcagctaactctttttcataaaggtaaagtgtattactatcatcaccaatacgatttaagtaatcgatatgcgtttcaaacatagcttcttcttcaacttgctcgtctaagaaccaatttaagaatgaaatcgtagcataatctttatctttgttagctaaatctgataaattatagaatctatgtgtaacgtcttgttcttgagccaaaccatcttcaaacgtttctaagatgctgctgaactctgtttttggtgcaggaattgctgtaaataaagcatgttctccacgatcgttaatatagtcatatatttttttaccatggaatctttcttctttagcttgttgaatataaaaatttgcaaaaccttcgtaagaattgtcgtcacaaaaggcagccatagccatataagcgtgagcagtataaaattcatgattcatttgttcatttaaagcatctaatagttctttgtttaacataattaataagcctcctatactttttttcagtatagcaaaactagacttagtagtaaattatacgctactttatttgaaaaagactcatgtaaattgggttgagaattgtttggaatacaacataatcgtgttataatatttgagtgaagagtagaggaggagctaaatgagatactggactgcaacccgcttagcaaaattggcaaggcaagcaagtaaagctgctggcaaaaaaggcacagacttgcccggtcaagtagctagaagagtagataaaaatatattaagaaagttagcatctcaagttgatgagattgtttttataagtggtacgaatgggaaaacaaccacttcaaacctaatcggtcatacattaaaagctaatgatatagaaatcatacataataatgaaggcgcaaatatggctgcaggtattacatctgcttttattttgcaaaataagaaaaatacaaaaatcgcagtcattgaaattgacgagggctctattccgagagtgcttaacgaagtaacaccaacgatgatggttgttacgaatttcttccgagatcaaatggaccgttttggtgaaattgatattatggttaataacatagcaaaggcgattaataataagggcattaaattattattgaatgcagatgatccatttgtgagtaggttgaaaattgcgagtgacacggttgtttactatggcatgaaggcacacgcacacgaatttgaacaaagtacaatgaatgaaagccgttattgtccaaactgcggacgtttactccattatgactatatccaatataaccaaattggtcattatcactgtgaatgtggttttaaacgtgaggatacacaatatgaagtatcctcatttacactgacaccgtttataaacttaaatattggttctaaaacgtttaatatgaaaatagctggtgattttaatgcttataacgcgattgctgcatattctgtattaagagagttaggcattaatgatgacggcatcagaaaaggttttgaaacgtatacatcagacaacggccgtatgcaatattttaaacaagatagcaaagaagctatgataaacttagccaaaaatcctgcagggatgaacgcaagtctctcagtaggtgaacaattaagcggtagtaaggtttaccttatcagtttaaatgataatgctgcagatggtagagatacatcgtggatatatgatgcagattttgaaaaattaacaagacaacaaatagagacaattattgttacaggaactagagcagaagaacttcaattaagattaaaattggctggtgttacagtacctgttatcttagagcgcgatatttacaaagcgactgctaaatctatggaatataaagagagctttactgtagcaattccaaattatacttcgctcgcacctatgttagaacaattaaaccactcttttgaggaggtcaaagcgaaatgaatgaattaactgtttatcattttatgcctgataaattaaatttatatagtgatattggtaatatcattgcgttaagacaacgtgctaaattgaggaatatccaattaaatgtagttgatatcaatgaaacagaaggtatcacgctagataactgtgatatatttttcattggtggtggcagtgatagagaacaagccttggctacgaaagaattaagcaaaataaaaacggtattgaaagatgccattgaagaaggcatgcccggtctgacaatttgtggtgggtatcagttcttggggagtaaatacattacaccagatggtacagaattagctggtttaaatattttagacttttatactgagtcacaaacaaatcgtcttacaggcgatattgtgattgaaagtaaaacttttggaacaatagttggttttgaaaatcatggtggccgtacatatcataaatttggtactttaggtcacgttacacatggatatggaaataatgatgaagatgcaaaagaaggtattcattataaaaatctattaggtacatatttacatggtccaattttaccaaaaaaccatgaaattactgattatttattagaaaaagcatgtgaacgtaaaggcattgcttttgagcctaaacaagtagataatactgaagaagaagctgctaaacaagttattgttgatcgcgtagctaaaaattaaattataaaaaagcacactcgtaaagcgatatgaatttgatgcgcaccccaaaagttggactaaaaatctaacttttaggggtgtattttttatgggcaaacattacaaatatgaatttaaattaaaggtagttcaagaatatttgaatagtttattaggttatagagcattaacaaagaaatatgaaatatcgaataaaagtttaatcgaaaggtgggttacacaatataaagaatttggacccgaagggttaagtaaacgattgaaaataaagtttatactagagaatttaagctatatgttttaagatttagacaagaaaacatgttgtcttatcgagaaacagcaagccattttaaaataagtaatagcgccatgatatgtgcttggcaacgtatatttgaagagaaaggtatcctcggactagacaacaatcggaaaggacgtccaaataaaatggataaaaaacattcgaaagtaaagtctaaatcaaccgaattaaaagaaagtgaacgcgaggaattagaaagactaagaaatgaaaatgagatattaaaagcaggtatagcttatcaaaaaaagttacaagccttgactcaaaattacgaaacaaaacattcgaaaaagtaaaaatcataaaagtattacatgaaacattaaattttgggctcagtctattatttaaagtttcaaaagtagctaaatctgtttattactattggctagaacgttttaaacaaccaaataaagataaagaattaattgaaactattaaagcgatatgtgaagaatgtggatatatctatggctatagaagagttactcaatccttatcaaataaaggtattaaagtgaatcataaaaaggtaagaaagttaatgaaagaattaaaactcacttgtacaaaatttacacatagaggacgtaagtataaatcttacaaaggaaatgtaggcaaaatagcaaaacatttattaaaacgacgttttaatacgaatcgcccttatcaaaaagtagtgactgatattacagaatttaagttaaataatggatcaaaattatatttatctgcatatattgatttatatagttcagaaattatgagctatagtatttcaagtcacccaacactagatatggctatcaatccactaaaagaacttttaaataaatgtccaaatgttaattatcgattaactatacattcagatcaaggttggcattatcaaaatgcgaaatacgtaaatattttaaaagaaaataaagtgtttcaaagtatgtcaagaaagggaaattgtctcgataattcagttatggaaaacttttttggattattgaagcaagaaatgttttatggaaaaaaatttgatcatttttatcaattggagctagctattcaaaactatattattttttataatgatgaaagaattaaatcaaaattaaaaggcttgtctcctaaaaattttaggaaacaaacctttgaaatattacactaaaccaaagtacaacttttggggttcagtacaatatatgcttatacgagtgtgctttttatttaagaataaatttagatttatgcaaaacgatgatctaatatgcgataaatcaatagaatttcataaatgacatgacttttaagttgattgctatcaaactcatctaaacctttcacagacatttttagtaaagaggcatgttgtttcttacgctcgaagtgtccagtcgaatatatattgtttatactttgtgcgatacttaaaatcgccaatttttcatcgtttgtaaaagtaattatcgtatctttcggtaaataaactaaattagataaatgggtaataaacaacctattagtatgcgcgcgcgtagttagtgctttaagttgaatccattctgaatcatggtgtttgtgatagcttagttcatctttttgataagaaagtaaggtttccactttttgatttaaatcgattaattgatttaattgacgataaggcgcgccttttgtaaatttaccaagtaataattgacgcatacgtaattcaaagagttcgtacatttttgattcagtcaaattaatagatgattcaacttgatcataatattttggaggtaaaataataaagtttactaatccagctgttacgagtccgatgatagcagttaataatctagaaaagaaattaaagaaataggcttcatgaatacctggaatcatagccatagctgttaatgtagctaccgtagtacccacatgtaaattaagtttggtacatagaataattgtgaacgtagcgctcaatgcatatgcgaaaggggattggtccccaaatataaatgtgaatatgactgcaaataatgccccaataatcgttgctggcaaacgacgatagcctttttttaatgaagctttagctgtaggttcaatcgtcacaatagccgttaatatagcaaatatcggatttaagtttaaagctaaacaaaataatgcagtcaggaatgtggctagacccgttttattgtacgagcaccgataatttttttataccagttatcattcatttaaaaactcctaatgtgatgtatagtcaaataactgctcaaaatggtgagtagtcgtattattaatatctgtgaaatgttaaactatagttgataaaattttctaatttattatatcaaaaaaagtctgctataataagaaagaatataaattacaaaaaggaacgggataatatgattgtaaaaacagaagaagaattaacagcattaaaagatattggttatatttgcgcgctagtaagagatgaaatgcaatcagcaactaagccaggaattacaacaaaagaactagacgatattgcaaaggacttatttgaaaagcatggagcgatatcagcgccaattcatgatgagaactttccaggtcaaacatgtatcagtgtaaacgaagaagtagctcatggtatacctggtaaacgtaaaatacgtgaaggtgatttagtgaatatagatgtgtctgcgcttaaaaacggatactatgcagacacagggatttcatttgttgttggtgaaccggacaatccattaaaacaaaaagtgtgtgatgtggcattagaagcattcgaagcggcaatgacacgtgtaaaacctggtgctaaattaagccaaattggtaaagcagtacatgcgactgcacgaaaaaataaccttacagtaattaaaaacctaacaggtcatggcgtaggccaatctctacatgaagcgccaagccatgttatgaattattatgaacctaaagataaaacactattaaaagaaggcacagtaatcgctgttgaaccatttatttctacaaaggcaacttttgtaacagaaggtaaaaatgaatgggcatttgaaacaaacgataaaagttttgttgctcaaattgaacatacggttattgtgacaaaagatggaccattattaactactaaaatagattaatcttgtttcggtctaaagtcctaatataagatggttccggagcctataccaatggttccggaaattttttataatggaatctaatcaatcatgaggtgattctatgaattatattacgacttatttagacaaaatgactaaaaacactttttatacaagtttagtagaatatagacagtatttagataaaaaaatgagaagcattgaaatgtacataaaatatttaattgaaagaaaagcgtatgttgaaaaattaatagactgcttaattttaacgctagaaaataaatatattgatatgatagatgaagattacatttactgtgctcaagaaatagagcattctgaaatagaaaaaattaaaaaagaattaaacgaaatggaagcagactatgcgagaattgaatccgatttatctcatcaggcagttgaacgtgcaaacattgaaactgaatgtgatttaatcgaacgtatcagtttagtcgcttaaagaaaggtggcgaaacatgactcataaatatatatccacagagatgcttatcgtatttacagcattaatgattattgccaatttttattatattttctttgaaaaaattggctttttacttgtgttattattgggttgtattttagtttatgtgggttatatctattttcataaagtacgtggtttattagctttttggattggtgcgttattaatagcatttaccttattatctaataagtatacgattatcatattatttatatttttaatagtactcatcgttagatatattatttataaatttaaacctttaaaaattactgcaacagaagaagaagtagactcaccggaatttataaaacaaaaatggtttggcgagcaacgatcacctgtatatgtttataaatgggaagatttacaaattcaacatggcattggtgatattcatattgatatgtctaaagcagcaaacattaaagaaaataatacaatcgttattcgacatatcattggaaaagttcaaatcgtggtaccacttaactataatattatattacatttcacaacgttatacgggaatgcctatgtaaacgaaacctcttataaagttgagaataataatattaaggtagtagaagaaacaaaagcagagaactatgctgtaaatatttatgtctcatcatttttaggtgatgttgaggtgatttataaatgaatcactactttagagcgatcgggtccatgttgatattagtatatagtacgttttttgccatattctttattgataaagtgtttgttaatataatgtattttcaaggtatgttttatactcaaatatttggcatacctgtactgctttttttaaatctaatggtgattttactctgtattattgtaggttctgtcttagcatataaaatcaatcagcaaaatcattggttaaaagatcaaattgaacgttcaatagaaggtcaaacagtgggtatcaatgatcaaaatattgaattatacaacgaaacaatcgaactatatcaaacgcttgtgcctttaaatcaagaagtacataaattaagaatgaaaacacagaacctgacgaatgaatcttataatatcaatgatgttaaagttaagaaaattatagaagacgaacgccaacgtttagcgcgtgaattacatgattcagttagtcaacaattattcgcagcaagtatgatgttatcagcaattaaagagacagaattgaaggccccattggaccaacaaataccagtattagaaaaaatgattcaagattcccaattagaaatgagagcactactattacacttaagacctattggtttgaaagataaatctttaggtgagggtattaaagatttagtcgttgatttacagaaaaaagtaccaatgaaagtggtacatgatattgaagaattcaaagtaccaaaaggtatcgaggaccatttattccgtattacgcaagaagccatttctaatacgctaagacattctaaaggaacgaaggtcacaattgaattatttaatagggaagaatatttgttattgcgtatacaagataatggtaaagggtttaatgtagatgataaggtagaacaaagttatggattaaaaaatatgcgcgaacgtgcactagaaataggtgcaacatttcatatcgtttctttgcctgatgcaggtacgagaattgaagtgaaggcaccattaaataaggaggattcaaatgccgattaaagtattatttgttgatgatcatgaaatggttcgaataggtatttctagttatttatccacacaatcagatatagatgtcataggggaaggtaagtcaggaaaagatgcaatcgaaaaagcacatgaactgaaaccggacctaattttaatggatttacttatggacgatatggatggtgtcgaagcaactgaacaagttaaaaaagacttgccaaatattaaagttgtcatgcttacgagttatattgaagataacgaagtctatcgtgcacttgattccggtgtagatagctatatattgaaaacaacaagtgctagtgatattgctgaagcgattcgtaagacttacaataatgagtcagtatttgaagcagaagtcctagttaaaatgagaaataggatgaaacaacgagctgaattgtatgaaatgctcacagaacgtgaaatggagattttattactgattgctaaaggttactctaaccaagagattgccagcgcttcacatattacgattaaaacagtgaaaacgcatgtaagtaatatcctaagtaaattagaagttcaagatagaactcaagccgtcatatatgcattccagcacaatttaattcaataaagggaatataaatctagcaagctaaaacaaacgcgtatggtagacatacacgctgttttagctttttaatttttatgcaacaataaaagcttttatatttattaaaatccccctcaaacaatgacatctcatttgtttgagggggattagttaatattatccgttatttttcgatgtatctacatcattaactgctttgtttgatgatgtaatatcagtattttcattttcagaatcttgattatctgcaatagatgtatttctattatgttcgatatcgtccaaggtttgttcttcaggtgttttaccagataccactttacgttgatggaagatggcgttgatttcagcaccaatgatgatgatgaaacctgtgatgtataaccataacattaagatgataataccggcaatactaccatatgttttagaataattagcaaagtttgaaatataaattccaaataaatatgacccacctaagaagacgattgttgcaaatatagcgcctggaataacagacaataatttaattttaacattaggagctaatgtgtataacaccatgaatgctataagaacaacaattacaggtaatacaaaacgtattgtatcaaacagccattttacttgatctccaaggcctagcgggccgaatagcagatcaccaatttgttgcccaaatgtaggtaacacgagtgcaactggcataacgataatcatggcaagcgtgaataatacactataaagtttagcaactacaaaatttcggctatcttcaacgtcataagcaacattaaaggcattcattagcgcagtcattccgttagatgcggaccataatgctgcgattaacccgatagatagtaatccaccgctcgcattctccataatatcaccaattatacctgaaacttgaggtgcataatcagatggcacatgagcttttattaaatctcttatcgtcgactgtttcacaccaacaactggtacgatagagagtaagaatagtagcattgggaacaatgaaagcatgaaataataagataactgtgctgacagtcctgatgcgtcatctttaccaattctatatacaagatatgagaaaaaatttgaatctttagtatattttgctggtttattgatacgtgaaacaaagaatgcttggttatctttcttaggtgacttagatttaaattcatcaggtgtgatgtaagtgcggtcgcgtttgatttgttgaccgtttgtttcattagactgtttgtcattttcttctacactttttgcctcattcaaaaagttagaagttgttttatcttttttagacatatctaatctccttatgtattgatatttttcaatatacattttaatatactttaaaatgtagtttaggtaaatatgtgatgctattttctttcggaaaaatagataattagattaataaaaaatagcataatgcatatgtgtatgcgtaagtatcaaatgaatgttaaaacctaagtaaataatgaagtgttattaatgtgaaaatacggtaatgcatcataataattaaagctacataatattaagacaatgatataaatgcatgcaaccgtttgtaaattcgtatataaacacaaaattgatattacaaagcaaagttaacataatgattgagcctgagatatgtcatacatcccaggctcttaaatcatttattgaagcttatatttgaaatacaaaaataagtagaattagccgtttaaacgattattcttacgctctacaaaagtattttttgcatctttgattgaacgttctaattctggattgttacgtctgatttcttctacaacgtctttccaatataacacttcgtctttaatgttattgattgcagaaggtttttgagaacgcgtaccttcttttctgtctttaatagattgttttaaagattgacgtgttgatttatcagctaatgttgctgcgcctccaattacggcacctaataaaattcctggaatgagtttgttttgcatgatgtgttactcctctcttaaatttgcatctttaattataaaattgattaaattatcacaagatgattgtaccattttatagacgccttcgaaattatttgtataataaggatctggaacgtctgtttcagtcatatcgctaaactctaatagtttaaacaattgacctttaatattaggattaatttgtttgatattatcaacgttactttgatccattgcaataatgtaatcaaagtcatcgtttgattcaaacagttcactaatcataccatcaaaaggtatgtcatgttcagatagaatggcttgtgtaccttcatgaggtggctcacctaagttccattgccctgtgcctctagaggtaacctttatatcatttatatttctatcaagtaatttttgtcgcatgattgcttctgccataggtgaacgacaaatatttcctaaacatacgaatgctactgtaatcatttgtgtacctccaaatttatatactcctctttcccattttaaagcttttttaatcatttcaaaagggtaattgccataaaagttttacaagataggtaaatttgataaaataaattgaaaaagaggtgaattttgtggcaaaaagtatagaacaaatgatagaagaaataagagatagattaaatcttgtgaatcaaagtttgattgatccagataattataaatcagcagatgaacaagaaattcgtgaaattcatgaatatgtaacatcaaaagcatcatttacaccgagtgaagcatcggcaatcgctgatgcacttggtcaaattcgtaaatagggggagttaccatatgacagaattacaagataaacttcaacaatatgccgaactattagttggtgtgggcatgaatgttcaaaaggatcaaccagtatttattcgctctagcgtcgatgcattagaactaacacattacatagttgaagcggcatataaacgtggcgcttccgacgttaaagtagaatatagcgatgacaagttatcgcgtttaaaatttgaatatgaatctgttgaattttttgagaaagacgctgtgaaatcatatgaagttgaaaaacgtatggactatgtgaaacgtggtgcagccaacttagcactcattacacaagatccagatctattgaatggtattgatagtgaaaagttatcgacatatcaaagacaatattctactgcttataaaggttatatggaagcaagtcaaaagaatcaattcccttggtgtgtggcagcattcccttcaaaagcatgggcacaacgcgtatatcctgacctgactgaaacagaagcatatagtaaatttattgatgaagtattagacatcgtgcgtgtagatggtaatgatccagttgaaaattggaaaaaccatgtagaaaatttaagtattcacgcgcgtaaattacaagataaaaattataaagcactgcactacatttcagaaggtacggatttagttattggactaccggaaggacatatttgggaagatgctacgagttatacgagtgaaggccaagcttttgttgctaatatcccaactgaagaagtatttaccgcaccacatcgcttaaatgtaaatggtcatgtcacaaataagttgccacttagtcataatggtaatatcattgacggcttcacattaacgttcaaagatggtgaggttgttgattttaaagctgatcaaggcgaagatgtattaagagatttactaaataccgatgaaggtgcaagaagattaggagaagtcgcacttgtacctgatgattcgccaatttcaaatcgtaacactattttttacaatacattatttgatgaaaatgcatcttgtcatattgcattaggttcagcttatggatttaatgttgaaggtggcacagaaatgactacggaagaaaaattagcgcatgggttgaatgactcattaattcatgtagactttatgattggaagccctgatctaactatttatggaataacacaagatgatgaaaaagaacttgtatttgaaaatggtaattggtcgaaataatgtaatggaaacattttttattttataaatcaaataagtgctaataagcgattaaagtaagcataggtgttaaatcatattaaatacatttacaaaaaatgataaagtctgatgttatttaaattgggagtgaggatatgaaatctatattatgctgatttcggactcactccttagtttatgtcattgagaattgaaaagggagctaaaattatgggaaatgtagcaagcaaatcaatgtcggaatctagaagtataaaagaaagacaaatattcccacaagatacgaaccatcttcacacgatgtttggtggtatattgatggccaatgtagatgagatttctgctattacggcgacgaagcatagcaattcacaagtggtaactgcgtcaacagattcagtcgactttttaaaacctattaaaacaggggatatcatttcttacgaagcaatggtttcgtatgctggtaagtcttcgatggaagtttgtgtacaaatcattattgaagatgttgttaagagcgaacgtcatttagcggcacttagctttttaacatttgttgctttagatgaaaatgggaaaccacaagaagtcccacaagtatatccagaaacacaaacagaaaaatggtttcatgacacagcacttgctagggtaaaacgtaggaaagagcgcagacaagaaagtaaagaaacgatagaatttttatccaatgtacaaaatatagaataaaataaagcgaaagttgtacagttaatcactttagattaaataacaactttcgcttttttagttatacgttgcatttcaacgatgcatgattttctcattctttttaaaatccgtattagggtagtacatgtttttaacaagtacattgggtccaagacaactaaattcggaacaatgacaattaagtgattgagctaaaggtgtcgcaagccaatggttaaatacgtctggtaatttatcatgtttaatgttagaaatagtaccattttcatcaccaaagtcagtaactatgacgttacctgtaaaaacattcacattcaatctattgcgtccatcagggtcatttctcatcgttacattcggtgtatctctcagtctttgcaataaggcttgattattttcatctttgatacatggataaataggtaatgtaccaaatagcatccataaatttggatcacgaatatctaaaatatgatggattgctgttttcatctctttaagagaaagcacttctagttggctagcaaaatcagcagggtacatgggatgaatttcatgtctttgacatttcatatcatggacaatctcattatgtattttttcaagatggggtacagtgctttgatttaacatcgtttcggcagaaataaacataccttgttgagataaggtactggaattagataacatttgttcatacagtctcagttttgcttttaatggaggttgcttgtccatggcaccaaatcctacatctgtaaactcatcaattgttccccaattatgtgaaatatgcatgacatcaatatattcagcaatatctaaataacgatctaatggtaaagttaaattagaattcatttgaacatagataccacggctatgtgcatattttaacaagggttttacaacatttcttatggatttttttgaaaacataggttcgccacctgtgatagacatggttttaaggtctggaatttcatctaaacggcgataaattaaatccataggtaacgggtctgggtctgtggtttgcaatgtataaccgacagcgcaatgactacaacgcatattacataaattcgtcgtcgtaaattcgatattacttaacgtcaaacgatcgtgttcttgcatatcattgtatgcttcccacgggtcgttatgaattgaaattggtttcttaacatttgatgcatacaaattcaacataattaaaactcccttttttaacttttatctgctatgagtatatactaaactttatttgtatagggaacggtgtatacaaatttatgaataatcgtatgtgtctcacatctaatatttcaccttaatattattaagactataccaaattttgtcaaatccatgttaggattatactatcttataaaaaggagtcatttttaaaatgaatgaaaatcaaacaattgatcaaattagagcaagattagaaaaatttattgatgatatcgatcacgtaaatccggacgaagtgcgcgtagaagatatagatgagtggattggtttgctcgatcaacttgaagaaaaagttaaaactgtttcaaaatcatcagaagataaataagttaattgaatgctatcttaggccgatgtttaaactttcaagttttagtctatatataacgtagaacataaatagagaaaggtgattattaatggctaaaaaagtagcaatcattttaacaaatgaatttgaagatattgaattaactagtcctaaagaagcgattgaagaagcgggacatgaaacagttgttataggtgatcaagcgaatagtgaagtcgtaggtaaacatggcacaaaagttgcggtagacgttagtattgctgacgcaaaacctgaagactttgatggtttattaattcctggtggcttttctcctgaccacttacgtggcgatgctgaaggcagatatggcacttttgcgaaatactttactaaaaatgatgtaccagcattcgcaatttgtcacggacctcaaattttaattgatacagatgatttaaatggacgtactttaactgcagtattaaatgtgcgtaaagacttagcaaacgctggcgcacaagttgttgatgaatcagttgtagtagataaaaatatcgttacaagccgtacaccagatgatttagatgattttaatagagaaattgtaaatcaattaaacgattaatatgtataggtaagtaattaaaatagtttttcgtgagttagttcataactggaagcgataggtagtataaaatacctgtcgttttccagtttttttgttgtctaagttgaacataataaccaaaaacgcattgttgtaaaacttcatgtggatacattcatacacccttggaccgatttttgcatttagctatagataaacatttaaactattgatacactcacttataatgatatgagagcaacataaaggagctaccgcatgaaaagaagtgatcgttataaaacgtacaacaaaccaaacgactcaaatgactcaaatcaattacatcataatacgtattttaaacctgtgaataaaccgcagaaaaagaaaaaaggtaaaggtatcattttaaaactactcattcccatcttaattattattggaataatcatcggcgtcatgtatgcattatcacttagagctaatacagatgagttgaagaatataacagaaaaagaatcttttgtttatgcatcagatatgcgagattatacaaaaggtgctttcattgctatggaagatgaacgcttttataaacaccatggttttgatgtgaaaggaacttcacgtgcattattttcaacattgagtgacaaaagtgtccaaggtggaagtaccattacccaacaagtagttaaaaactattactatgataatgaacagtcaattactagaaaaattaaagagttgttcgtggcacatagagtagagaaagaatatgataaaaatgaaattttaagtttttatatgaataacatctattatgggagtgaccaatacacgattgaatctgctgctaatcactattttggggtaacgactgataaaaacaatccaaatttaccacaaatatcggtattacaaagtgctatattagcaagcaagataaatgccccaagtgtatataatatcaatgacatgtcagataattttactaaccgtgttaaaacagatttagaaaaaatgaagcagcaaggatatatttcaaatagtcaatacgagaatgcaattcaagaactaggtgtttaatatcaaaatagcgcttaatttttaatggtatttataagagagatttaaaaaaataaaataactaagtgtgagggtacgaaatcaaaaagagtgattgattttgtatcctcacactttttagattaataaatctttaagcattttaattaagctagtcactatgattccattaccaaacaatatgcgttatccttagaggtggagtgaggataatgcctaaaattacaaaaatagaagtacaaaagaaaaataaagagcgttttaatttatatttagatgaggaatttgaaatgggtatcgatatggatacttatgtacatttcaatttaaaaaaaggtcaaatcgttgatgctgctgacatggaaaaaatccaaaagtatgaccaatatagacaagcagtgaatgtagcaattcaatttttatcatatagaaaaagaacagatcatgaagtgatacaacatttacaaaagaaagaaatttccgaatctgttatagcaagtgtcattgactattgtcatgagcaaagactaatcgatcatgaagactacgctaatagtttaaaaaacactatgatacttactacagataaggggccaggtattttcagacaaaaattgagagatgctggtgttgaacaaacaattattgatgtatatgctgagcgttatgagaacgaacaaccaatggaagatattattaaagttgcaaataaaatattaagacaaaaaaaaggtcctacagttaaaaggaaagaaaaactatcgcaagctttgatgcaaaaaggttatagctttgaaataataaaagtagtgatggatgaaatggacttctcacaacctgaagcagaattagacggtttgttacaacaagaactagagaaggtttataataaatattcaagaaaattttcaggtagaaaattaattaataaaacaatagaaggtcttatgagaaaaggctataaatatgataaaattaaagctaaactggaagagagtggtattgtagatggaacagaagaaattgagtgaaatgagtgaggttgagttacgtcacgaaattcaaggctacaaagaaaaaatgaggaaagcagagatgaatggcatatttaatgaatatgatgtttatcaaagtaaggtcatcattgcagagagctatttggtagatagaacaaaaatagaaatcggtagaatttataagctaaatgacgggactgagaattattttaaagttgaaagattaaaaggtgtttttgcttggggctttagaataaaaagtgcagaacctgaagaaggtttaccaattgcattattaaaattatagaaggatgacgatagatgggtagttcaattatattaaagttactcaatgtaactcattattatagaaataaaaaatctaaaaaatggtatttaccatttggatatgatgcagaagatattgaattgaataatattaatctacatatctatcagggggaagcactaggtattattggtgaaggcgactcctctaaatctttgatagggcgtttattaagtggtgaaattaaaccagataagggtaaagttgttagaaagaaagatatattttttgcagatatcgaagataaattgcttcaatctacgacggtgatagattatgtgaaaaatgtaaccacgttatttccttataaaacatctgatcataaagtagaacagattattaagtttgcccatcttcaagaagatacaaatacacctattaaaagtttgacggatgaagcctatgcgagattgcaattcacattagcgagaacatcaaaatccagtattattgtaatgaaccaaatactgagttatttagatgaaagttactttgaaaaagcgattgaactaacgaacgaatacataaatgaaaatttgaccataatacttatcgatgacaatatagaacgaatttcacgaacgagtaattatattgcgtggatttcacatggtcagcttagaatggatggatcgcttaaccaagtattacctgcttttagagaacatgaaaaagatcggctatcactgacgagtgaagaagaaaaatctaattttgatgttgattggaaaaaaagcagaacaagaatccctgagttaacctataatttcaaacgtattgaacgctataatcatgctaagccaccagtagcacttgtccgtttttggacattgtttattgtgttcttattaggtatggtcatcatggcattattaatgtttaatgatttaggcaagcttgaaataggcaaaaatgatgatcaaacgacaatacaaaaccagcaaaaaaatccatatgaagaaaaattagcatatggcattgttttaaaagatgcgataagtttagaaaatatgtcgaatggtaaaaagataaaagcagataaatatgcttttgttacgataacaggtgaaaacacaaaaaattatcgtattgaaattgataacaataactataaagttgcaaagaacaagttacgctattttgatccagcaagcttgtttgaagaacatagtgcaagtgcattagcgccctatatgcataaaaattatagtaactataatgagttctttaatagccatttgcataaaaaacatagcacggtgaccgattcgctcgtacctgaaagtggtaaagatgaccgttttgttgtacccatcgttcaacaaccgatatcgatgttatttaatgatcaaaataaattagttggttttacgattactataaaagataaacaaaaactaaaagaaaaatttaatattgaaactaatttttggataacaaaatcggatgatgggtattttatggcagatatgaaaaataataaatggatttatatcgaattgtaggtgtgaaaaatgattgatagtatgattaactattttataaatacaccacatctcattaaacatgcgtaccatcgtttgaaatcgcaatggatgtggttagtaataccctttatagtaagtatggtagtactcttaataatgatgttgatatttaaaatgaatggtacggaagaaattaaacaagcacggggcttttttagattagcagcggtgatgagttttgcatatatttggattgcgatatatcaaagttttaacacatttaaacatgattactttactggaaaattatttaatatcaatccaatttttcaaaatattatcatagcgctattgtttagtttggtgatgttcatttcacttataatgattattttagctacacccgtaaatattgaaagttcggtgctatctacattattctttgttgctatgtcattagtattcattgtagttatttctacagtattaggtttaatagcgattgtgagtaacaaaatcaatataatttattatattgtaagtgcagtcatgtttttcattgttccaattattttcatacctaatacaaatacgacattagtgtcgcatattttaatgctcaatcccttatattatttaattgaagggatttcacagtcggttgtattaggaacgctgagtctaaataatataccacagcatatatacttcctattatttttagcaatagtgtgtgtcattatttatgcattatatagaagtattgcgcataaaaaatattcatatgttgattcatataagcaacaagcagagaacgaaacttctgaaaatctagaagataaagcagatgaaaataaataatgttagttacttaaaagataaaaaactggaggttcacgttaataataacgcgtacctccagtttttaattactttatttagcaaataatttacgctgtaatttatcttcactgaaaacccaaccaatataagaatgatcgataaccatatcttcatctaaatgtgcaattgcaacaaatgagtaatgaccattttttagataacgtaaatcgattaatctaatttctgtggtattatcatttaatttgcgtgattgccaacgatatattgacgagaaattaagaaatgttttaatatttttatcgtcttttacatattgcattaaatcatcacttgggaatgattgacgtttcgatttgtcactaaatacgatgtttcttccatagctacgaccaacataatcgtgcatttccgtttgtactgcgacgcgccattgcataaaccttattgttggtgcaacaaatacttttacaggattgtgttcttgtttaatttgtcgcaatgcttgttgttttataatcgcttgcattctaaagcgaataatataatatacaacaagtatgccaacgattgggaaaaatgcgagatatggatgtacgccaacgatccacagtaatatacctatacaccataatacaaatatgattggatcaaatgtattaataacactgagttgaatccatttatttgtaatgggtctaagtgcttgtgtaccataagaattaaatatatccacaaatacatgaagaaatacggcaagttgcgcccataaccagacatgggtcgtatctacatttttaaagaatgtaaatattaataatgtaatgaacaaaggccataaaattgtaaaagggattgaatgtgtgatgcctctatgatttgatatataagtagcattatcttttaatttaaaaatggtgtcaccatccggaattaatgaaccaactactaaagttgtagcagtggctgcaaaagatcccgccatggcagggtcttgggtcgctaatgctgtgagtccgatacccatgacaatatgtgttcctgtatccataagtattcactcatttcatgtctataatatattcattataatctaatacgtccaatattaaaaataacacactatatatcatatagaaaaattttagaaaatagaaagtgatgtgctttatgcttaatgaaccaaaattcaaaaaaaatctagttgactggtttaataaaaatcagagagagatgccatggcgagaaacttcaaatccatattatatttggttaagtgaagttatgctccaacaaacacaagttaaaacggtaatagactattatcataaatttattgatcgatttcctactattgcagatttaagtaatgcacaggaggatgaagtgcttaaatattgggaggggctcggttattatagtcgtgctagaaattttcatactgccattcaagatgtacatcataactttgatggagaagtaccgaatcatccagaaacgttcgggaaattgaaaggtgtagggccatatactcaagctgctgtaatgagtatcgcatttgatttacctctagcaacggtagatggcaatgtatttagagtttggtcgaggctaaataatgatacacgagatattaaattacaatctactagaaaggcatttgaaaaagagttacagtcttatgtcgaaagtgacgctggtacatttaatcaagctatgatggaattaggcgcattagtttgtacaccgaaaaatacgctgtgcatgttttgtcccgtacaagagcattgcgaagcatttttaaacggtacagttgaaacattacctgtgaaaaccgctaaagttaaaaagaaacatattaagcaacatgtttacatcattaaaacgcaagataatgaagtattaattgaaaaacgtatgcaaaaattattgaataatatgtgggaatttccgatgtatgaagcggaagcggaacatcaaattaattcaattttaaatacaaatatccaattttcagaacaaccagcttataaattgaaacatcaatttacacatttaacttgggacattgaagtttatttagcagatcaggtaattaataacaaagatgaaataagtttacctaacaatatgaagtggatgaatttagatgaaaaagaagattataattttccagtgagcatgacaaaaatatataaatttttattatcgcattgatagactcggtgtagtctacttagttatgttataatttataatgtgaaattaagaaaaggtggtgtggagcatggtaaaagaatccatacctaaagaaggtcagacaataaaaatacaaagttataaacatgatgggaatattcatcgtgtttggtctgaaactactatattaaaaggtacggaacatgttgtaataggtggaaatgatcatacgcttgtcacagagagtgatagtcgtacttggattacgcgtgagccagcaattgtatatttccattcagaattttggtttaatgtgatatgtatgtttagagaagatggcgtctattattattgcaatttatcttcaccatttgtgtgtgatgatgaagcgttaaaatatattgactatgacttagatattaaagtatatccaaatggtaagtatcatttattagatgaagatgaatatgaacaacatatgagacagatgaattattcttcagatattgatgtcattttaaggcgcaatgtagatatcttacaacaatggattgaacagaaaaaaggtccatttgctcctgattttataaaagtttggcgtgaacgatataaaaaaattagaaattattaagcacatttaatgtttttaattaaattatcctatatagtggtatgcgtgtaattaatagcaaccaaaatcttttatttgaaaaatggtatggcaaatgaacataaacaattaaagatcgtccgtttatagcagcctcgttgaaattcagcgcaggctgtttcatttgcgagtaagtgtggggaggaaataaatttatgattcgaagatatttacaatttgtaaaaccatataaatggcgaatcattgctacaattcttgtcggaattttaaaattcggtattccaatgttaattccattattaataaagtatgttattgacgatatcataaataatggagcgattacagcggaggaaaaattcactagattaggtattgcattgggcattgcagtattcatctttgtaattgtgagaccaccaattgaatttttaagacaatatttggcgcaatggacaagtaacaaaattttatatgatatacggaaaagattatataatcatttacaagcattaagcgcacgtttctatgctaataatcaagcagggcaagttatttcaagagtgattaatgacgtagagcaaacaaaagattttatattaactggtctaatgaatatatggctagattgtataacgatagttattgcattgacgattatgttttatttaaatgtaaaactgacgttagcagcattagttattttccctgtgtatatattgactgtatatttcttctttgggcgtttaagaaatttaaccagaaaaagatcacaggcgttggctgaagttcaaggattcttacatgaacgtgttcaaggtatgtcagtaattaaaagctttgcaattgaagataatgaagcacaaaattttgataaacataaccaaaatttcttgcagagagcgtttaatcatacgcgttggaatgcgtattcattttcagcaattaatactgtgacagatgttggcccattaattgttattggttcgggcgctttcttagctattaatggatctatcacggttggtactttagctgcgtttgtaggatatttagaacaattatttggtccattacgtagattagtgtcatcatttactacattaacgcaaagtttcgcatccatggatcgtgtttttcaattgatggatgaaggttatgatattaaaaataaaaaaggcgcacttccgcttgaaattaaagaaggcgatatcgagataaacgatgtgagctttaaatataattcagaagaagcaactatattaaataatattaatttgaagattaataaaggtgaaacagttgcattcgttggcatgagtggcggtggtaaatcgacattaattaatcttattccgagattttatgatgtttcaggcggagaaattaagatagatggtacgaacattaaatcttatttaactggcagtttgagaaatcaaattggattagtacagcaagataatatcttattctcagatacaattaaggaaaatatcttattgggtagaccaaatgctacggatgaagaggttattaaagcagcgaaaatggctaacgcacatgattttattatggaactttctgagggttacgatactgaagtcggggagagaggcgttaaattgtcaggaggacaaaaacaacgtgtatccattgcgcgtatcttcttgaataatcctccaatcattatcctagatgaagcaacaagtgcattagatttagaaagtgaatctatcattcaagatgcattgacagtattgagtgaaaatagaacaacattaattgttgcacatagattgtcgacgatcacacatgcagataaaatagtggtagttgaaaatggtgaaattgtagaggttggttcccatgaagctttattagctaaaaaaggtgcttacgaacacttatatagtattcaaaatttataaatattcgttactcaaaataatcaattaatatgtgaacaattaaatctataagttatatttaattatgttaatgatgtttataaaaattaaaaaaagcgaggcaaactaatcaaactgaatcagttttgatatttgtctcgcttttttatacacaaaaatcgttcgttttatctttgttaactagataataaggtgttttatacacggcatatcattgtggaatgacgcttgataaaaaaatcgcatagtacagcttatgttagctgcgctatgcgataattagttataaatcaaaatcttcgtctaaaatatcaatttcattgtcattgttatggtatgagaagaaactaatacgtaatctgtctaaatgttctaatgtgtaacgatattcttcaatagctgaaatgatttgcatgacatttgcgtatgaatacatcgtttgataaggatttctaataagttccttttggaaggcatccattagttctttcttttgtggattttcaatttgattttcaaattggcccacgtcatactttgcttttttagaaaggctaataaatatttgttcatgatatgcaatcaacgtatcaatttctaatttaatctgtaatagcaattcatgattcaaattgtgtaaatcgttttggtagcgattcatttttttcagcacgtcataggcatgacgcgtacttctaaccacttctttaaaaagtatttttttcctgttttgggcatacgtttgttttttagttaaaggtcgttcttcttcataataaacaaatgtttgttctagttttttaattctaccactaattacgcctctatcttctttaatatgatggtactcagatgtatcatttaagactaatttgaaccaaacaaaaatatcggaacaaatatttaaagagttgtaataaatttttgattcgaattttggtggtaagaatactaggtttacgattgaagaactgattacaccaatcataacgagcgcaaaacgataaaatgcagaaacataaaaatctcctgtgtgttgtcccataataattaatgctgtcacactagctaaggtagcaacatgtgctaaattaaagcggaaaagtacagcaattaataatattacggttacacccataattacaacattatctccaaataccgtaaccattgctacagcaagtaatgcaccaaaaacattacctattgcttggtcagaaacagttttaattgatcgaaatacgctaggctgcattgcaacaaccgcactgaccccagcaattgctttcaaaccagcttcattaggtagtagagaagcgataaacaaagcaagtataatggctatacctgtcttgagaatacgggctcctaatttcaaaagtaccgctccttaatatattaataataattgtgtttatacttgttatacaattattagcagtaaatttcaagtttatttcatttgactaaaagcataatcgacagcttttaacgtagaatcgatatcttcttctgtatgttcagtagttaagaaccaagcttcaaatttagaaggtgctaagtttataccttgatttaacattagtttaaagaatttagcgaaagcttctccatctgaattttctgcttggtcataatgaacaaccgtttcatttgtgaaatatagcgtaagtgccccgtatactctattgactgttgctgttatattgtgtttgttaattaaagaaagtaaaccatcttctaatcgtttacctagtgcatctaattgttcataaacaccgtcttgttctaatacttccaataatgcaataccgcctttcattgaaaggggattaccagccattgttccagcttggtatgccggacctaatggtgctacttgttccattatctcttgtttgccaccataaccaccaattgggagtccgccgccaataattttaccgaaagcagttaaatcagggtaaactttatataaatcttgagcgccaccataatggaaacggaaagcagtaatgacttcatcgtaaataacaagacttccattattgtgtgtaatttcgttaacttgttccaaaaagccttgttttggctcaaccataccaaaattaccaacgataggttcaactaaaacagcggcaatttcatctccccaataatcgattgcttctttataagcatctatatcattgtatggaacggtaatgacctcttgagccacactcaatggtacacctgctgaatctggcgaacccaattgtgatgggccactaccagctgcaactaaaacaagatcagagtgtccatgatattgaccagcaaatttaactattttattgcgttttgtataagcacgtgctacacgaattgtcgtcataacggcttcagtaccagaattgacgaatctaattttttctaaggaaggaatagcatcgcgcaatttttttgcaaattctatttctaattcagttggcgtgccatatagtatacctaacgctgcttgttcttgtattgcttctgtaatatgtggatgtgcatgaccagtgatgatagggccatatgcttgtaaataatctatatatttattaccatccacatcgtataaataagcgcctttacctgaacgcatcattacaggtgcgccaccacctactgctttataagaacgcgatggagagttaacgccacccaaaatgtattcatcagataatttctgaagtttttcactttcagtaaatttcattattatcaacctcttttaatttaatattttcgcttattatcgtatcataaaattaatcataaaaagaaatagggtgagttatatgttgaaaaaaggagatcaatttcctttatttgaattagaaaatcaaaatggtgagctaatcacgaatgagacgattaaaggtaaaaaggcagttctgtatttttatccaagagataatacaccaacatgtactacagaagcgtgcgattttagagataatatcgctttatttaatgaacttaatgccagtgtctatggcattagtggtgacagtaaaaagaaacatcagaattttagtgacaaattagatctaaattttgacttacttgtagatacagattataaattatctgaagcggttggtgtatatcaactgaaaaaatcatttggaaaagaatccatgggtatagtgagaacaacctttgtaatagatgaaactggtcaaattattgatataattgaaaaagttaaagtgaaaacgcaaatagatgaattaaaacaaatcttggggtgagcataaatgaaagcagtcagtctaatgaaattgggcgatttagaaaatgaattgaaagcacgctttccaaatgtagactttgtgtttagcaatggtctctcagatatagatgacaaggacagagaaactttagaaatattatttggttatgatggtaaattggatgaatcgtttttaaaacaatgtcctaatttaaattggattgcttggtatgccacaggtgtaaacaacttgcctttagaatacataagcaagcataatattaaactaacgaacgctaaaggtgtacatgcaaaacagatgtcggagtttatatttgcgtacatattagatgattataaaaagatgagaacttgctacataaatcaaaaaaataaatattatgattcttcgttaactggatcaagattaagtggagaaaagatattgtttataggaacaggaagcatagctcaacaaacagcgagaattgcaaatgttatgggcatgacagtgatgggtgttaatacaactggacatactattgaagggtttagtaagatatatccaatcaatgaattgaaagaagcgttgcaggaagcgaatattgtaataaacactttgccagaaaccaaagatacaattcatctacttgaaagagagcattttgaatgtatggaccataattgtctttttatcaatgtaggcagaggcacagtagttaaagaagaaattttaatagaagctttaaaagaaaaattaattagacatgcatacttagatgtatttgaaaatgaaccattgcaaccgagtaatgagctatatcaattgaataatgtaacgattacagcgcatattacaggtaatggtaatgaaaataaaagtgaagtgacaggtatatttgagaaaaatttaaaatccattctcaataacaatgaactaattgagaatgtcgtaaatcctttgaatggctattgatgtgtttatagctttgtttattgacatttccccatgtgaacagttatattaatattaagtaataataattcttaaatagaaagatggtgaggggaatgagtgcagagttggaaacgatagagcatcaattagaggattcgattacttcattgagaaataatggtgtaagaatcactccacagagacaggcaattcttaaatttttaattgcttcacatactcatccgacagcagatgaaatttatcaagcactttcacctgattttccaaatataagtgttgctactatatataataatttacgtgtatttaaagatattggtatcgttaaagaacttccttatggagattcttcgagtcgttttgattttagtacacacaatcactatcacgttatatgtgaacaatgtggtaaaatcgttgacttccattatccacaactagatgaagtggaacagttagcacaacacgtaacagactttaatgtaacgcatcaccgtatggaaatatatgggttatgcaaagattgccaagataaataaacttgatgatgagaaataattaagcaaagctatttttaaaatcaattttaatcatgaagaagggacttactgaatagtaagtcccttctttcacttttagttattatagaagtaagtgatttaataaagtgcatttttaaaaaggtgaatttaatttttcaacattaactaatatgaatttaacttaatgataataagaaaaggtaataaagtaatcaaaatgtgaaattggttatacaatctatttacacaaaataaaatttaaatacatttaaacgatatttggtaatatccgtagtaaaattaaactaaaaagatctgtattttttattgacggttataaataatcttgatattatataaaagtcgtcaaaacacgacgcactgcaatataaatcgaatcaacagaaattatcaaaagtgtaaatttgacacttgttaatatagttgaaagataatacaatattaaatgttgagttaaaaaacgcaacaaacttaataaaaaataacaaaaatttattgttgacttaacaaaaacttaatgttataataaattcttgtaacgcattattgaacattgaaaactgaattgcaatatgtcaacgttaattccgaacacaacattaaattgttggttcaaaacaagtgttagaaataacacaaattagtattttatgagctaatcaaacatcataattcatttatggagagtttgatcctggctcaggatgaacgctggcggcgtgcctaatacatgcaagtcgagcgaacagataaggagcttgctcctttgacgttagcggcggacgggtgagtaacacgtgggtaacctacctataagactgggataacttcgggaaaccggagctaataccggataacatttggaaccgcatggttctaaagtgaaagatggttttgctatcacttatagatggacccgcgccgtattagctagttggtaaggtaacggcttaccaaggcgacgatacgtagccgacctgagagggtgatcggccacactggaactgagacacggtccagactcctacgggaggcagcagtagg

SEQ ID NO: 40 - DNA, 100445 bp, Staphylococcus saprophyticus
  misc_feature (43997)..(43997): n is a, c, g, or t
  misc_feature (57332)..(57332): n is a, c, g, or t
  misc_feature (57385)..(57385): n is a, c, g, or t
gattcgccccatgctttattggagataccttaataaatgaaatcgttctcctatcaaatgtattaagggaaatcgttattaatacagttgctagcactgccattggtatttgaccgataatatctccaaaaacgaataagctaatgagtaaaaaagcacccgtgatcaatgttgataccctcgatgtagctcccatcgttgcattaaatcgcgattgacccacaagtgcgctaccaccatagccaccaaataaagcgacaattgtattggcaacaccttgccctatcgtttctttatttttatcacttttagtggcagtaactgcatccatcatccgcgctgttaatgtcgtttgtacaacagcaacaattgccattgtcactccatacatgcttgaaataccaacgatatgcatatcatacattgcatctggaaatgacagcatcggtacatgaatatgcaatgatgctaaatggtgtacatagaaaatatctggtttaagccaccatgcacatatcgttaaaataataatcgcaatcaatggtgccggcataaatctgatatatctttgtgctaaccaaataattaaaaaagatgccaccgctatgacataggtcgcatttgaaaatttagtatattttttagttgcgatggtaagtacaatacacctaatgcatttcataaaacctataacaacatcctgtgggaatataatctaataatttattggatcggcaatacccatcaaaatttggattattcccgtaattaacgtatccaatattacagcgggcataccgtggctagacataagcggtgctacaactatttaaacacccactacttggagctgacaccattaatgtttcgatcgccggtccaaacttataactaacatcataagtccagtacttagcatacctatggttggacttacacctgcaataaagaaaaagcaatgccaccgggtagtaacgcgagtgccaacaaaacacctgcaagcatattggtgactaatgccccgtgccactgattaaaataacttatgtgacgcacattcattgtcacctccaaattgctttaaccatatggtatcataattgtcgaaatatttaatcaactctgcctaaaataatacaaaaaaagccaagtcaatttgactcagctttaactattcaaattattgttctaatttgatacgattatcaatcaacactttaccatctttaatgactttttcagcgtggttaataccatagtgatatggaatatattcatggttaggcgcatcccaaataacaatattagctttatctccttgattaatggtaccagcatcaatgtcaatggctttagccgcattaacagtcactgcgttccaaatttcatttggagataatttcaatttcaaggcagcaatcgacatcacaagttgtaagttgtttgtgacacaactacctgggttaaaatctgtcgcaatcgcgattgcgccatcattgtctaacatacctcgcgcatctgcataagattccttgcctaaatagaaagtcgtaccaggcaataacaccgcgacagtgtcactattttttagtttttctttaccttctgtacttgatgctacaagatgatctgcagagattgcattttcgtcgatagctaactctaacccccccaatggatcaatttcatctgcatggattttcacatcaaaacctaatgcttttgccgcttccatatattttttcgattcttcaaccgtaaacacaccagtttcacagaatatatctgcaaaatcagcatacgccttaacttctggtaataaatcaatcatctcttgaagaaaatcttgattagactcagcatctttaggtacggcatgcggaccaaggaatgtgtgtttcatgtctaagttatatttttcagccaaacgattagatacacgtaattgttttagttcattttctttatctagaccatagccacttttactctcaacagctaaaacgccatgttccatcatcgtcaacaaattcttttctgcctttttaaataatgcttcttcagtagctttacgtgtagcttcaactgtagataaaatgccgccaccttgttcaagaatttctaaataagaaacaccttgtcttttaagtgacatttcatgttcacgtgaaccaccatgaacaagatgtgtatgtgcttcaaccaaagctggtgaaaccactttatctgttgcatcaattgtttcagttgcttcataggcatctgagtgctctcctgcgtagacaattttgccgtttttaacgacaaccgttccattttcagtaatgttaagttcgcctaactcttttccttttaatggacgttcagtagattttggtaaaattagttctttaatgttttgaataattaaatcgttcattatttgtctcctttacctataatcattgggattttgatacctttttcttttgcaactttaatcgcagattcatatccagcatccgcatgtctcacaacacccatacccggatctgtcgttaatacacgtcctaatcttctatcagcacgttctgatccatctgctacaacaaccatacctgcatgtaaagagtaacccataccaacgccgccgccatggtggaatgaaatccatgaaccgcctgctgctgtattaattaatgcgtttaagattgcccaatcgccaacagcatcagaaccatctttcataccttcagtttcacggtttggactagcgacagaaccagaatcaagatgatcacgaccaatgacaattggtgcagaaatttcaccatctcttactaatttattcaatgctaagcccattttcgcacgctcttcataacctaaccacgcaatacgtgacggtaaaccttggaaggcgattttttcttgcgctaaatctaaccaacgaattaatttttcattatctgggaaatctttctcattcttcatctgcacgctcatatcttcggatttccacttaatgctgcaaaacggaatgggcctttaccttcacagaacaatggacgaatataagcaggcacaaatccagggaaatcaaatgcattttctaatccatcattaaatgcaacctgtctgatattattaccataatcaaatgcaacagcaccatttttttgaaattcaagcatgagttctacatgttttctcatagaagtttgtgcttctttaacatattgtttcggatctttttggcgtattgctttcgcttcttctaatgaatacccttgaggtacataaccatttagcggatcatgtgcacttgtttggtctgtcacaatatcaattttaaaacctttatctaagattgctttatgtgtgtcaaccgcattaccgactaaaccaattgataatggttcacccttttcacgagcttcatcagctaaacgtaacgcttcgtctaagtcgtgtgttttaacgtcacaataacgcgtctcaatacgtttatctatgcgtgtttcatcgacgtctacgccgataacaacgccaccgttcattgtaacggctagtggttgcgcaccacccataccgcctagaccagctgtcaaagtgaccgtgccatttaatttgccattaaaatgttgattcgcaagttctccaaatgtttcataagtaccttgaacaataccttgtgaaccaatatagatccaactaccagctgtcatttgaccatacatcattaaaccttttttatctaattcattgaaatgatcccaatttgcccattctggaactaatactgaattagatattaatacacgtggcgcttcttcatgtgttttaaatacagcaacgggtttaccagactgcactaacattgtttcatctgcttctaatgaacgtaatgtatcttcaatggcttcaaatgcttcccaattacgtgcagctttacctatacctccataaacaactaagtcttcagggcgttcagctacttccgggtcaaggttgttatataacattctcagtaccgcttcttgttcccaacctttacattcaatgtctaaccctctttttgcttctatttttctcatgaaaaatcactccttgtttttaataaacatatcctttgtttaacaataactaaaaaaaccatagtacaaatggtatggtaataagcaatgtaagcacgatacttacacaaaagcacacctttctctatatgaaccagtataatgtgttattatatagactaccaatataaataaactaattattgatagctttaaactataaataactaattaaaggagctttccttatgaaaatcatacaattagaatactttgttgctgttgttaaatataatagctttactaaagccgctaactttttacatattagtcaaccttctctgacgacaacaattaaaaaaatggaagctgatctaggttatgatctatttatgcgtacgactaaagatattaaaattactgaaaaaggcattcatttttacaattacgcacgacaactgatacatcaatatcatcaaactatcgaaaaaatgtacgatctcaatatgggacatgtacctaaaattaaaatatctattttagaatcgacaaaccaatggctttctcaagtattatcgacacatgctaaacaatttccagatcaaacttaccttgtatctgaaattcatgatcaaaataaaatttttgaattgctcgttaactttgagaatcatgttgctttcactaacgaacaaatgaagcatgatgatattgaatctataccgctctatgaggagtcctatgtgttgatcactcctaaaaatgcttttccacattcacatactacttctattgcatccttgccattaatattgccaaccaaaggatcccaagttcgtaaacatctagatgactactttaaccgtatgaacttgcatcctaatatcattattgaagcggatcgatttgaagctgccacgaactttgtgcatagaggtttgggatatgctgtgatacctagagtttattatcaatcatttaatgctaaggatttagatgtcttagatattcaacctaagttaggtcgttctatatatattaactacctaaaaaaaagaaagcactcatcacgtgtgctttctttcatcgaacaatgtgttaactattggaattttaaagaataaaatgatataagaaattagctgataattttgcagttctgttatctacatcatacttaggatttgtttcagcaatgctaattgttgggactttttcattcggaatgatgcgtttagctaattcaagtacgatgtgtggtgataatccaagcacaccattagcactcacacctggtgcaaacgcgctgtcaataacatccatacatattgtaaacatgatgacatcatgatcatgtacaaaacgttccaccttatctttgattggaggagaaatttggtgaagcaattcttctgaataaacataaccgatgcctttagtttctgcatagtcaaaaagtgctcgagtattgccaccctgttgtatacctaatacaagataatctgtgttttcatcttcttctagtatttgtctaaaactcgtgccagatgttgaacctgattcttctcgtgtatcaaagtgtgcatcaatattaatgacaccaatagaagcgtcaggatatgcctctctcgtgcctagatattgtgcatatgcaatatcgtgaccaccaccaagtaagaatgtttgattatgtttttttatagatttggcaacgtaatgcgcaaattcttgttgcgtttcttctaatctatcatgattgtgttcaacgttgccatagtcatatacattacattgtctaataactggtaaattggcaaacgtttttttaattgcattcgggccttcttttgcaccaatacgccctttattcaattcaacacctttatctaccgcgtaccctagtatacctacaccatgacgtgattcattgtcatcatcttcaatattgcgaaaatttatagtttgaaagtgcctaaattgtgattcatctgtttcactatcaattcttccagtccaaagatcacgttgtgctaatttatacataattctcctcctttaaatacttacggtcatttaaaagtatacgcttacattttcctcaattcaatttataataatatttacccaattcgcatcattataaatttaaaaattcgtaataaatatttcaatttcatgttagattaactcaaactattacatttcaatgataaatcgggaatttaatttatttctatctcataaatatgtataattaggtacaaatgatttttttgaaccctattggaggttacataaatgaatacaaaacgtataccaggttttcaatgggcaatgatgatttttatcttctttattgttgcttatgcattacctattatacttaaagatttacagagttccgttccatttaaagatttcgtctttgatatgagtacacttgcaccattcatagcagcttttatctgtattgctatattttcacacagaggtactcaattagctagtttaaaattgactattagcttaaaagtgattgagcgtgcaattttagcgcttattttaccattaattatttttattatagctatggtatgctttaatattttttctgatagttttgttcttttacaaacaaaagatttatctgtttcaatttcatctattattataggacaaattgtcatggcttttttagtagaactcggtttccgttcttatctacaacatattgttgaaactaagatgaacacgttcttcgcgtctattattgttggttttatgtatgcaatatggaatgtaaacatcgcctttagttttgactttgcaatatatagtttcctatattcatttgctttttcaatgattattggggaattaatacgtgcaacgaaaggccgtacaatatacattgcaactttattccatttcgcaatgtcatttggacttgtattcttatttaatgaagaattaggcgaagtatttgctatgaaagtcatcgccttatcaactgcagccgttgctatactttatattttaattagtttaattattcgtacaatcctttatttctttacaaaacgtaatttagacgaagtagaggaaaataattatcttgatcacgttaatgacaccgatgaagatcttactgatgttggtgatgaatataacgtgtcagaaaccgacgaaacgcatcattcagcgaatgtaaatgccgctacagctgagacatcttcagaagttcaagataaggaagatccaactgatcgtcatcacgaatcaaatgcatcagaccaagataatcaatacaattcgacagaagatactgcacatgaggacgacagtcgagcgaatataatctcagagaatacaccaagtccctcatcaaatgattcaacgaaagtggacgctaaacactcagattcacgtgcgaatagtgcagtagaagcatctactgagaaggcacatccagaatcagaccaagatgaagtgaaagtaaattctcgctatacttcaaatcgacagtcatctgtcgtatctgatgcacgtacaacaatcgatgaagaaagtgatgaatcttcaagacatttgagttcagaaagtgatgatgtaacgcaacaagataatcaacctttagatacagctgattcatctaatgctgattacgaacgctcaccttttgatttgaaaagtaaacgtggacaccgtagctaatcatactcaatataaaatgattcaactgattttatgaattttaaaaaccaatgctaagctatgtttcatgactgatagctttagtatttgttttttgtttaattactgtagcatgtagcgatatgatattttcaaacgatacaaaaagacattgtgctcgaatgaataagcacaatgtcttttttaatctatcaatgatgctttatttttaatctttactccattcgttgtaccaataatggcttggtctgcaacatttaaaaaataacctgtttctagtacaccgataaggtgaatcaaaaattcatgcatacctgctgcgttgataccttcatttaatacaacatctaagatataattaccgttatctgtaataaatggcacatcatcaaccattctacgtgttacttttaattcatcatatgctttaattcgtttagctacaagtaaccaattaaatttgtccacttcaacaggcaacttaaacgtttgtccaagatagtctacacatttactatcgtcagctaagacaacaaatctttcggccatggcatctattactttttctctaaatagcgcgccaccaccgcctttaattaagtttaagtcgttatcaatttcatctgcgccatctattgcaatatcgatatgatccacatcattcacatcaatgatatggatacctaactctttggctataaatgccgttttattagaggtacagacacctgtgatttttatttgttcttgttccagtttctctgctatttttgggacaagcaattcaatcgttgatccagagccaataccaacaatcataccatctttaatctggtctaatgcatcattaaatgtactcatttttaactgtttcttatccatcatgcttccccttttatactgtacttttatctttattgtacatgagatttattaaaatacctagacagaaaactgattttcaaaataaatttatacatatacttgcataattaacacattgttttaaaataataatcaatctattgttggaggtacaaaaatatgatttataaattagaagccatttctactggcaaaatacaagatttaccatatagtaccaaaagacctatgcgttctgcattaaataaagaaaaatattcaggaaaaatgtggcttacacatactggatttgctgaagatgaacaagaatataaaggacatggcgggccaaataaagccgtttgcctgtacagtaagaaaaattatgaactttggaaacatgacctaccagcgttaccaccctatgcgatgtttggtgaaaatttaacagcaactgatttagatgaagcgcatgtctattttggtgatcaattccagcttggtgaagctattttagaagtttcagaaatcagagaaccttgttggaaaatacaagaaaagtataaaatccctgatttgattaagagaatgtcatcttcttgtaaaactggcttctattttcgtgtgttagaagaaggctacgtacacgactccgatcatttaaaacttatcaaatctgcggatgcatcaacacgtctttctgtgtatgagctcaatgacatctattacaatgataataaaaatattaatcgcttaacctatgttttaaaaaatccatatttaacaagcgacaggattagcaaatttgaacgcttcttaaaacgtgctcaaaaataatagcgtttgctgtaattaaattaaaatgaaatgaaaggcgggtatctcatttaagatacccgcctttcatatagtctatacttaatgattaaccactctcccaaatggtgtcataagtattgactcgttcatttttatagttgcttttcagaaattttatatgacgttttagagtaaaaaggctcattagcttctaaaatggatggtgcttgatcgcctaataaattaatatcgtttggaatacattgcgtttctagtgtaaaacctgagtgcgctttataaatattaaaatcactattccaaccagttgtatcattaaatgtgtaaatgacaatgtttggcatatctgtgtttacttttaatataaaatgtttattttccacagtcatttcattaccaccaatatcaaatggatgatcaataccaccaaagcgttgcatttgttctttaacaattgcgtcttcactatcaaaaatatctttgaactggatattttgttcttggaaggtatttaccaaacttaaaggttccatacttttcacgatattgtcttcccctaataaatacatatccaattttgaacttgaaatgctgtgattatcaatcacattgttgtctctgttcaagttaaaatatacatgattcatcggattaaacaatgttttttcagttgatttcgctttatattctatcgtccacttatggtcgacattataagtgtgaatcacttctaaatcaatatcacctggaaagtgatcatctgcactttgaattgtagtagtaaaaataaccttcacttgtccgacttgttcttcaattttataatcaaagaaacgtttgtctataccattgggtccaccatgaatattatgtacaccattattggcatctaactcatattttttactatctaactcaaatgttgcatttgcaattcttccgccatatcgacctacggttgcaccaaaattataaggattcgattcataaaactcatctgcttcaacgacattacccagtacaatattattatcgtcgtatttccacgatacaattctcgcaccataatttgtaaaaacaatttttgtttcttcattatcaattttaatcaaatcgataccattgctttgactttctacttttgcaaacatcattaatgactccctttcaaacctacactttaataataggtttttccatgaataaaattcaatcataaatgtcgccttcgttatacttgattcaaggggttttgaacaagtatgaaggcaattatctaatatagatttcgtttacgaatataagataatcataatttcatcattaaaacactgaattggtgcacacaaatgatctctaaaacatatatttatggtccctcaatcataaaatatgcttagatgtttaattaaaaataattatgtaacatttgaatacattcaatcattttttatatcttcatattactcacttatattgtaacaatttattcaaatatttatctatactaatcataaattctatcaaactatatagaaaattgttatacatttttctatttttacctaattcccaacaaattcatcatcttccaatcaataattatatgaattaataacaaaaaaacgagctaagacgtctatcatgcctcagcccatttcacaatctagtcatgttatctagagatcacgcaacgccatttgcttagaaaaaataattttctatctcactctattaggtattcatgcgtttaacttcttttaaaaatacgtttcattgcattcataaagcctttatcaaaactcaaaatcgtatttttgtaacttcttacagcaatccataataaaataaaaatggtaataatggataaaataacactcacaacaatctcccaaactgcaacatcaggtgacgctgaacgtacaaacattacgaacggagacaatagcgggataaaactagtgatttttgtaagcattgtatctggattcatcacactgaataacgagatataaaatgcaatcatactgaatagtgtcatcggcatcaacgcttggttgatatcttcaatacgtgccgtaatggatcccaaaatagctgctaatataatatatgaaaggataccaataattagtgaaacgatacctacaatagatatttgcatcgttaactcgtttggttcaattttaaatcctttcaacatatcacttatatcaaatacgaagaaacatattaagcctgccgctacaaatatgataatctgtgtaaatgccacagcaatcacaccggaaatcttagctaaaatatgtgtgactggactcacactcgtaataatcatttcgataacgcgtgacgttttttctgtagcaatttccatcgctacttgacttgcataattaaagacaataaagaatatcaacatcagtcctgcgtataccattattgtgttaaagcctttttgcgcttcacttaaatttgaattgcttgctttatcagcaatgacttctgacgtaactttactttgtgattgcaattgtttcagttccccttgggacaaattcaagttcgctgcgacgagttgtgtttgaattgttgataaagaagcttttaatttttgtttttgttgttctgaaactgtatctttacttaaaatttttccagaaagtttattatcatctgtcattttgataatgtatgctttatctaatttttcgttttgaacttgcgttttagcttgcttctctgaaacttttttaaatgtagccccctcgtccagttgatcaccttgactttttattattttataaatttcattgtcagatgaaacaacaccgactttatcaggaccatcatcaaacaaatcaataatcttattcatattagatgctaagagcattaagacaataaccaatccagtaaaaatcataaatgatttcgtcttgactttgttcttgtacgtcagtgaaaatgttgctaaaaatttatccattaacgtcacctactttgtctataaatatttcatttagtgaaggttctactacctggaatcgtttcacaaagccatattgtttcactatgtcataaatttgttctgcgacggattctgtctctatcattgctttaatctctctcttatttctgtctacctctaggacgccatctactttatcaatttctggcatttcgtgatctgtttcaatgactacacgtttgttgccatgattcgttttcacttcatcaattggacccgatacaacaagctctcccttatttaaaatacatacgttatcgcatagttcctcaacatgttccattctatgagagctatatataattgtcgtacctgcattgtttaagtcttgaaccgccgactttagcaattcaacattcactggatccaaaccactaaatggttcatcaagaataagcaactcaggatcatgtagcatacttgctagtaattgaattttctgttgattccctttagaaagtgattcgattttcttttctctattttctgtaatatcaaatcgttttaaccagtaatcaattgcttttgtaatatctttagatgccatgccttttaatgtagctaaataacgtaattcgtcttctactttcatcttaggatgtaagccacgttcttctggtaaataaccaatacgattatataacgagcgatcgattactttatcattatatgtgatgcttccctttgtaatgggtgtcaatcctaatatcattctaaatgtggttgttttcccagcgccatttcttcctaaaaatcctagcatctttcctttttctaaggaaagtgacatatcgtttacagcagtaaaatttttatacttttttgttacatggtcaattattaatgacataccatttcgccacccttcttatataaatcctctactctgatgataccatttgtcttttgaaatatacatttttaaataaatcacacatatttatattaataagactgtatttctcaataatccaatatcacaatgatcttaactttacattataatatgtaagcactatcataaagataaatgaagtctctaggcttattccacaaactgattagggggcaatgcaatcatgacatatagtatcggcatcgactatggtaccgcttcagggcgcgtatttttagtagatacaacaaatggtgaaattatttctacatatataaaagaatatccacatggcaccatttcagaatcattaaatggtaccgaattaccgcacaattattttttacaacatgcagcagactacacttctatattggaggaaggcgttcagtacgtcttaaaagatagtcaagttgatcctaagtccatcattggcattggtatagatttcaccagttgtaccatcgtgttcttagatgatgacttcaaacctttacatttacatccagatttagaagatcaaccgcatgcttatgtgaaactgtggaagcatcatggcgctcaagatgaagcaacctacatgaaacaagtaagtgataaggtaaacccatcctggttaaatttttatggtcataacgtaaacagtgaatggatgattcctaaaatattagaagttaaaaacaaagcaccagaagttttagaacgtagtgcctatatcatggaagctggagattatttagtcagtttattaactgataaaaatattcgctctaattgtggcattggatttaaaggcttttataacgaaacagatggcttcaattattccttttttgaagctatcgatcaggaattaccagaaattgttaaaacaaaatgcgaagcacccgtagtcaatatcggtgaaagcgctggtagtttgagcccatattatcaaaatctatggggccttacagaacaagtacaaatttctccgtatatcattgatgcgcactccggtgtactcggtgtcggcgcaattgaacaaggtgaattcacgcctgttatcggtacaagtacatgccatctgatgctcgatccaaaacaagaacccatacctgcaattactggttcagttaaagatgctatcattccagatctttatgcatatgaagctggacaagctgctgttggtgatttatttaattattctgccagcctcgcaccaaaatcttatgtagaccaagctgaaaaacaaggcctttctatccttggatacttagagaaactggctgctgatatatcaatagataaacagcatgtaaccgtactcgattggcataatggtaaccgtagtatcttaagtgatagtaagctaacaggtagtatctttggtttaacactgcaaacaccatttgaaatgatacacaaagcttatttagagtctacagcgttcggaacaaaaatgattatgcaacaatttgaaaacaaccacattcccgtagaaacagtatatgctgccggtggtattcctataaaaagtgaacttttagttgatatttatgctaatgtgctaaataaagaagtggtcgttattgattcaagtaacgctacagcgcttggtgcagctatgttgggtgcaaatgttggtggcgcttatccaagcttaaaagaaactgtcaaacatatgaagcaacctgtttattatcgtaaacaaccagaagctaaaaaagttaaacagtatgcgcttttatttgatcgttataaagccttgcatgatttgcttggtaaagaatatccacaattatcttacattaattaaattataaagagggctgtttcaattatatgaaacaaccctctttataatttatggcatttaatatttaaaattatcgtcttttttagtagcgttctcatcactagtgttaacttcttcactgaaagcattctcttcactattcacgtgtttcacatttgtgtcttcgtgtataggtgcgtcttgatttgcatatgtgttagtagatgatttaatatgattgccatatttatgactagcaccatatttattcgtttttctttcactatcaagacaacaaatcactagcatgtagatgccaagtgctatatagacaaggaaaataatagcaaaaaatatgatatatactggattattatattcaggatcttgaatattcactacaaatagcaccggataacttataacaataacacctagatatattaatggcatgagcatggttcttcccgtatcatgaaatcttctgattaaaagtgcccatcctggaattaatgttgccaaactgtatattaatgcgtaacaaatcgataagaataataatataactcctatagcaaccaattcttcagaacttgatgctgcgcctgatacagtcattattaaaccgatgatatacaaaatcaatgctggcatcataaagatgatgttccataatgccatgaaccagtactcgctacgacgtgaacggcctttgaaattaacatagtttttccaaaataatttgagtgcctgaccaaatccaatgcttcgttccatactttcccctcatttcatattcattttgttttcaataagttttgtcatatactagactttaaccaaaagcatatgctaattcctattaatcttataataattagtgtaacaaataatcatgtacatagtaacacaattttacaaatattttaaaaacatttaaaaaaatttaatttcatattattaaaagtggagggcatctaatggattttttacaacgcgataccgtaacaattgctaaagacttactcggcgtaagaatcatctaccacgatgaactacaaacctttacaggttatattgtagaaacagaggcatatataggaacaaaagatcgtgctgcccatggttataacggaaagagaacacctaaagttgaatcattgtataaacaaggcggcactatttatgcccatgtcatgcatacacatctactcattaatttcgttacccaattggaaggccaacctgaaggggtattaattagggcaatagaacccgaagaaggtatagagttaatggctattaatcgaggaaagaacggtttcgaactgactaatggcccaggtaaatggactaaggcgtttaacatacctagacatttagacggatccaaattgaatgaaggtcggctaaaaattgatacaaaaaatcgtaagtatcctaaagaaattgaagcaagtggccgtattggcatacctaacaaaggggaatggacacacaagccattaagattcactgtaaaaggaaacccatatatttcacgaatgaagaaatcagacatgcgacaaccagaatatacttggcgcatataaaaaaataaaggacattcagaatacgtttttaaaacgcatattgaatgtcctttacttatatagttcttttccaaaacataaagtaagtgtctaatgagagacagatatatttatgctatttttgctttttatctcgatccaatagtccaaattgaattgtaatgattgtacaaattacaaaaatcacaggataaaatgaatattttaaaacttctaagtaagatacatcaccgtattgttctaccattaacatccctgagtcatgtggtaataccattaatgcacaacacgcgaaaatatctagtaaacttgccatacgttttggtggtactttatactcgtcaccgatttcttttgcaattggcgcagaaataataatagccaatgtattgtgtgataaagctgctgaaagcaccccagacattaaactgataacatactcagcactcttgcgcccttttgcttttgccttcatagctgtaataatccaatctataccaccgtagtaacgaattaatgccacaagacctgatactaagaaagcaacgaggaaaatagtgaacatactttccataccatcacctattgcttttgtaaattgaaatacgcccatttgaccttgcaccatgccaagtacgccagccataacgataccaataattaatacaagtattacatcaagaccagcaatcgctgctatcaagacgaaaatataaggcaaaatattgataaaattaaaacttaaatctccttctactttacctgttcctcctacaacagcataaaaaatagctgtaataatagctgccggtaaagcaattaagacattcatcttaaatttatctttcattttcgcaccgacaccatttgttgctgcgatcgtcgtatcagatataatagataaattatctccaaaatatgcacctgcgatcaccgctgcacccgccgctgcaacacttaaatctgcagcttgtgcgactgcaacaccaacaggaatgaatgctgcctgtgcaccagttgaagtccctaatgttaaggccgcaaaaccactcatgataaatataccggggatgagtaaacttggtggaataacagacagacccatattaaccatcgcagccttgccacccatttctgaagtcacagtagaaaatgcacccgcgagtagtaagattaatcctaaatttactatgcctgaattaccagcatgttcagtaaaaatttgtactttttttgtgaatgctgttttcctatcatagcaagtccacgcaatcacaatacctatcatgattgccacatgtctcggtaactgatcgaacgcatcctctttacccattatcgtgaaagtaatccctacgccaatatataaaattaagaatatcagcaacggcaataaggctaacgccccatattgtttttcacttcgtaacgactgttccatatatatactccttataacctagtattttcatacgatatatagtaaatcaaaaaaggaacaatgtcattgaattgacgttatccctttaaaataagcatattatttatttaattaacgcatcacccgtatctgtcttaatcatgatcacatgatggccgttaccgacttttttattttcaaattgtttgtcttcaatatttaaattaccagtatcactactatactcaatttgactgtttttaggtttatccttaccatatattaactctacattaccagtatctgttttaatttgcataggtttatccgctggtgtatctttcattaaaatatcaccggtatccgttttgaaatcaccgtgttgaaattgcgttttgttcagtttaatgtctgatgtatcaccagacgcaaccaattgattgaacttactatcattgatggtcaaatccattacatctgtattcaactgtgctttatccgcattgatatcatttaaagttgtactaccatcatctgaatgtacctttaaattttctaaatcttgaggaacatatatagtcatatcattatatcgcatgtctaaaaacgaaatatccacatttgattgtcctttgtggtcacttaccgttaagttgccatttttaacttttgcatgaatcttgattttttcattagaaccttttgataatactttaaaacgtttaccttcttttattttcacattactatgttttaaatctaaatctaatcctttaatacttttattattataagtttcattaaaattcgttgtaatttgatttgcttttttatgttcaattttaaattgttgaactgcacctactgcacaaatcactgttatgactaaaccaatatcaaatatccatatcaatgattttttcatctcgtagcacttcctttcactacatggatattccattttagatatttaacacaaagtacataaaatccttttgtaataagataagtaatgacgaatagtatgagtcctaaaccaaacatcgtgcctgtcacaaaaacatctaataagacaactgcttcaaacccttctatagcacctttaattataatacctatcggtgagagtatgagagatatcgtcgtaatgattaatgaaataaccacacttaataatatgataaaaggaatcgttataatgaaaaagtttaatatacttaaacccataacagctaatgtagcatgacccacatcccctaatttattacttttttcagccttgactatcgcagcatttgcatttaattctttcgctaattgtctcggattacctaattcatcagcgatttgttcttcggtttttccttcttgtaatccactataaaaatgcgtgtcatattcattaataatatcttgtcgttctgtatcatctaaatttttcagtagtttacgctaaaaatataacacactactgtacattgcaaggtactgatcaatgttttttctcctttactatataggttgtttaaattggcaactattgttttattataggtcaaactatcattctagttttaaagaatgtataatgatgcttgtatatttttgtaaacgtttacttaatatgaaatcatatttaaataattacataaagttaatgaaataaagggggtctattaatgctagagttagatgcaattaccactttagcacttgcaagtattttatacttacttggtgtatacatcgtcaatcatgtaaatattttgaaaagattatgtataccagcgccggtaatcggaggactattatttgcaattgttgtcgcaattttgaagtcagcaagtttgttaacaatcaaattagattcagaatttatacagaatttctttatgctcgcatttttcacaacgattggcttaggcgcttcgcttaaactactaaaattgggtggtaaaatacttatattttactttatcttctgtggcatattagcaatttgtcagaatttaataagtgtttcgttagcaaaagtactcaatatttcgccattacttggcttaactgcgggttctatgtcaatggaaggcggtcatggcaatgcagctgcatatggacaaacgttacaaggcataggtgtcgattcagcattaacggcagcattagccgcagcaacactgggtcttgtcgcaggtgggttaattggtggccctgtagtgaaatttttaattaataaatataacttaaagcctgaacaagcagaagaaactacgcaagattattctgaaagtgatagaaacgaatacttacacaatcgaatggcgcctactaccgtatttttactacaatttacaattgtagctatttgtatggccattggatcctatttaggaaacacatttaccgatttaacaggtatcaatatccctatttatgttggtgcaatgtttgtcgctgtcataatcagaaatatctcagaatacaataatctaaaaataattgatatgaaaatcgttgatcgtatcagtgatgtatcacttagcctattcttatccattgctttaatgagtattcaacttactgaaatatatcaattagcaataccgttaatcatcatcgtactagttcaagttttatttattattctgttctcggtcatcgtattattccgtggcttaggcaagaattacgatgctgcagttatggtaggcggttttattggtcatggtttaggtgcaactccaaatgctatggcaaacttagatgttatcactaaaaaatatggcgcatctcctaaagcatatctcgtagtaccaattgtcggtgcattcttaattgacctacttggtgtaccaatagtgactatatttatcaatgcctttaaatagataacttacaaataaattttagtagcacttattaagcttttttgaaatatttttagaaatgacaattattttgtattgagcgcttttattatttgctttatttaatacaataaataccaatcatgtttattttatatactattacattgatagtgatttatgccgaaattgtgagtatagtacttgttgaagattacatgctaagacagcacccgtgaaaattatgggtaaaaaaactgccaacaaaatcaaagattttgtcgacagtttgtagcaagtaatttaagtgtttgtataagtacttgtcatttatactccaatcccttatcacacatttaagcaagccgagcatttttgccgtggcttgcttaatttcgttttattctattattttgaacttttcaaattatctgatgtctaaacctctttgttcaatccatgactgtaatttaggactaaataccatttgcgtttgttttaaatcttttattgttttgacatcaagcatggtcataatcttcttcatatgatctgtaaattgttcagtataattaagtgtttcagtaataccatagttttcaacttgatttaaaaatgggcgtgacatcccgactgcgcttgcacccaatgccaaacatttaactgcatctaaaggtgttcttacaccaccactggctaaaatatccatatcttgttgatatgaagcactttctaacagtgattcaactgttgtttgtccccataatcctaaataatccatatctttgtatgtgcgtctttcattctcaatatccacgaaatttgtgccacctctaccgctaacatcgacgtagcgtacaccgatttcattgaggctcttaatagtttccttactcataccaaatcctacttcttttacaatcactggcacgtctacgcgtgagacgatttgtgctaagttttccatccaagtagaaaacgttctattaccttctggcattacaagttcttgtggagcgttcacatgaacctgcagtgcttgagcatcgagtaattttacagattcaaccgctttatctacagggacatctgcaccaacattactgaaaataataccatccggattcgtatctctgacaatactgaaagatgatgccattttactatttcttaatgcagcatgtgtagaaccaactgccatagcgataccagtttcacgtgctattacagccaatttttcattgatttgcttcgtccattcactaccaccagtcatagcattgatatataaaggttgatctagtgtgaagtcttttaactgacttgttaaatcaatatcatcgacatcgacactaggaattgaatgatgtacaaatcgtatttcgtcaaaatcagaaatcgtggcatctccttgtgccatcgcaatttctacatgttcattttttctttgttctcttttattatcgctcatcttttgctcctactttcaatcattttataatgctttgatatattaaataatgtcttaaattacatactaaaaccatttttcttttttaaaataataaatacatcctgcactgatcgccaacataatacctaatacaatatagtaaccataatgccactttaactcaggcatattgataaagttcatgccatatatacctgtaattaacgttaatggtaagaatatcacagatactagggtcagtatttgcatcacactattcattttaaatgaggtataggacgaataattatctcttatttcagttgtcacttcttgtgcagtttttaaaatactttgttgtttaataatatgatcctctatatgttgaatatacatatgatttttactatctacaagtaatagcttactttctttaatattatctattaattcgttcatagggtatataatgcgtttcaatttaataatgtcaccacgaattttaaatacatcttccatgatacctttaatggattgactgtttaaattttggtcttcgaattcaaacactttatcttcgatgtcataaatgtgtttaaaataatcatctaccaatttatctaaaatatacagtgccacatcagacgtatctaaatctttattaaattgatgtttaatcatttgttctacatcttctaatattgaaaatggtttgtgatggtatgtaatcaaaatattatctttgataaacaaatttaacgctttatccctattaaaaggggtatccatactatgaaagacgagatattgatatgtttcataggccttatattttgctctcggtgtcccttttatcgtatcttcaatttcaagtttattaaatttaaattgtgattgtaatacttcgttttcagtttccgttgggtcattaaaatcataccaaatcagcgtagcttcttttggtatttcattatagtgagctacctgaacgaaaggttgttcagaagtttgatatttaatcgttatactcattattcccctcccgaaatcgtttcctttattttaccatgaaatagtatgtgtgtatgttttagatttatttcgttaagcatactttaaaacatgttaaactttaattatatattttcaaactttgaggagttgtattcatgaaaaatcctttcacagtgattcagcaagtgaacgaagatatgattgatcacaatggtcacatgcatgatgctcattataatatggtctttagcgatgccattaaccaattcaattatcaacacggattatccttggaagagcgtgaagccttaaactatacactatttacagttgaagaacacacggcctacctttctgaattaaagaaaaacgaacgctatcacattaccatctatttatatgattataatgaaaaaagcgtccatttcttttccataatgacaaatgaacatggttcaaaagttgctacgaatgaagcactcatgttaggtattaatcgtgcaactaataaaactgcacctttcccagaacaatttgcacaagcaattatcaattattatgataatcaacaattaattgaatggccaaaacaattaggccatcgtattcggatttcaagaaaaggagtttagatattactatgacaaatcatatacattcagcagtagcatcacaattgtatgatttattcgatgatactaaatatgaattaagcgaattaaatcaaagtaagcaacttgtattaaacggaccagacaataaattaattaaacgtggtttagatatcagttatttacaaggtcagaagaaagcgattgatgccatagattcaatattaaaaaatgattctgacgatgcagctttcaagcttaattttacggaatttagcactcaagtcatcaaatcattcgaatcatctgcagctaagtttaaaagccttgcgctacccaccgaagactatgatgtagtacttgcacatcattattcattaatgggtcaaaaattaattatcgacacagttcacacaacgatattaaaccaaacattttaatgacatgtgcaacaaacctaatgtagcgtaaagctataaaactataatcacaacctaatcacaggtcgttgtatgacaaccatatatgcatttagattcgctatttctagccatatagcattttattaatgattataaaaaaacaagctttgacatccatgtttcagcttgttttaaaatatttagttatctgttcattcatcttttaacgtttctacgatttgcttaaccactttatgagactctcttataggtaataaggggaaagcatgaatcattcttttatattcataaaaatgtatttcttgtgatttatctgctaaaatatgtgcaaatctttgcatgtctgggaggtaaatttcgtatgcaccgccaaacatatatatcggtggcaaatctgtcagttctccataaattggtgacacacgtgcatcgtctaatggcagattatgagaccatacgtttaaaatgcgttgtacgccatctttatcaacgatgacatcttttttatctagtgattccgtgataccttcattatccaattgggcatctagtaacggtgaaaacaaatataatttacttggtaaagggcgttgtttttccttcagttgttgcacaaaacttagtgctaaagcagcaccagtgccatctcccataatgacaatagcatcactatccacttcagttagcaatttattgtacatctcaaatatagcattataagtatcatctatatgaaactcaggtgtctttggatagattggcatgacaacttcacttaatgtacttaatgaaagcttatccataaatctccaatgaaaagcagatggctgcaatgtattataaccaccgtgtatatagagtaattttctttcgtggctatgtctaaaacgaaatctaaagacttgaatatcccctagcatttgtttatctaaatcagatttaacattcaatgtttcaggttgtttatgttttttttcattaattttctcgcgatcatttaaaaattgctcaaaagcttcatctgaactaaaaataatagatctatgaggtaagaggtacttattcacaaatttagttgtcagtcttgatttcatttataatccatccaatctaagtttattctccaagtatttagaatgtttcattttacttactaatcaaaattcatagtatggtaaaattaatacaatgacaaaaaaatacagttataatataatttgagttccctaataatcgaatctatcaataactagttatcacagttattgcatattataacaaaatagaaacaaaagtcataaaatatttagatgtagcattctacagtaatgaaaggagtatcctatggcagaacagaaccatcaatttaaagattttgaacataccctaacaagtgaacccatgcaacgtgggatgcgttttgaaaaaaagaaaaagtcttgggtaagtatgcttatccagattattgtccttattttaatggccataacgggttatagcatgtttaaggaacctatttttaatttagtcttcgcgcaagagacaatcaattttcataaactcactaatttccaaactactataaatgatatttctaacttaaatattaatgtcgcctcaatcgataatttacaaacgagtatcgatcgattaatcctagtattttacgtgttctttatcgcctgtattttaagtttagtcttaactttctttactttactatttaacagaaccgtattaaaagtagtaaatatgtttgtcatcgcgattatgttagtcattacatttggtttttcttatctaattaaaaatattgcttctagaatttcagactcaatgaatcaatattatatttcagttaaacctacccaaatcttaactgaagctgatgcaattcataatgcttttacattgttaggatgtagtatcgcgctcgtattaattagcatgtttttcagaaatcgtatagtgcgtaaataagcttatcgtcatctatttaaaaacatactgtaaaagaaaaagccgcttccaacatttaagttggaggcggcttttatgttaatcaaaaaatatgatttaattttctttagacatatagtgatctttaccttttaagaataaacttaaaataaatgcaagtgcacttagcgctgttgcaattaagaatgcactattgacaccattgatagaagctagtttttgaacaaattctagcacttgtgaagttgccatttgttcgccgcctaacgcttgcgccatttcttgtaaacgatctttaataaatgggttcgttttatctaaatcttgtgcgtaacctgcagcatattgcgttgtttgtgtagacatcactgtcactaataacgccgtaccaattgaacctgcaagttgtcttaatgtatttgataaggcattaccatgtgcaattaatctctgtggtaatgcattcatactagctgtcataattggcatcataataaaactcataccaaaagaacgaataatataaataagcattaaatgaccataagtcgtattcatatttaatttcgttaattcccaagtagcataagtcatgattgcagtacctactaatgccaatggtttgataccaattgtgtctaataatttaccagcaattggacccataacacccataatcaaggcaccaggtagtaataacagacctgattgaattggggtaaagcctcttaagttttgcaagtaaagtggtaaaagaatcataccaccaaataaactcattgtaacgatcatattgatgactgttgttaacgtaaatcctgagtattttaatacttccatacttaacataggcacacgcattgtaagttctctgatgacaaatgcaataataaagataacacctaatattaaggaaatgactacgataggtgaactccaactattgttacctgcttcactgaatccgtaaagtaacgcgccgaaaccaatcgtactaaagataattcctggtacatcggcttttggatttgttgttacttgatatactctaaaccaaatataagcaatggctaaagataccaaaccaatgatgaacataccatagaacataacattccaatgataattttcaacaatataaccagataatgttggaccaatcgctggtgctaaaatcatagcgataccaagcgtacccatcgctgccccacgtctttcaggtgggaaaattgtcataaatacatttgtacctaacggcattaatataccggcaccaatagcttgtaatacacggcctaccatcatgattgtaaatgattcagacagtccacagactaaagaaccaatcgtaaataatgtcatcgcaactaagaatagcttacgatacgaatatttattaaataagtaggcgctgactggaattaagataccatttactagcataaatcctgtcattagccattgacccgtattagctgaaatattgaaatctgtgtttatcatcggtaacgctacattaagtaaagtttggtttaatatagctataaacataccaaagatcatcgcaattaatactttgccttgggtcgtacctttaccaaacataaatgtactatgcttttcttttaatttttcatttactttagcttcttctgaattaggattgatcgcttcatgatctgaatcatcttgttgttctacttctgtatcattggtatcagtagaaaatgtgtttaattcatcattctcatctttattttcacgatcatcttcgttcgttgcttttgactccttggatgattcctgagaatcttccgtatcgttcactttaaatttagattgataaatttcattagaaacatgactttcatgctttgtttgttccacttgttgatttactttattatgttttcttttagttagaaaaacattaagtaacccaactaaaatgagcgctatgactacgtaaattataatgaaggtcattgtcatttaaagaccccccttaatttttatgaattttaacttcagcgttcattcctggaacaacatttttagatggttttgaatcgagtgaaattttcacaggtacaacttgagatacttttgtataattaccatcagtgtttgatgaaggcatcattgagaaacttgaagctgtagctttaccaacttcttctactttacctttaagttcagcgtcttcgccgtcaagttttacatttacatctttgccttcttcaacatctgcaatatctttttcatcaacatttgcagtaatgtaagaatcatctaaattataagcataagcaattggagtccctgcttgcgccattgaaccttccataccatctgtttttacgattgtaccatcttgtggcattttaacgtccatgttttgtgattggccatcttcacctttagctgcaatttctgcaactttatcacctttatttaatttttcattgttttttacatcgaatgatttgatttcacctgatgctggtgcagatattttaatttgttctccatctactttcgcattatcagtacttacaaatcctgtagcttgattataaaaatggaaaccgactactcctataatcacaagaactacaatggtaacgatgttgattaataccatttttttcattactctttcctcctatttgcttttaaaattcactttatatattatagatacataacatttaaaaaaacaccgacacttctataaaatgtgtcgggtaagttattgtatgcaatttttgaaggagataaaatgaaacagaaagctaaagaaaaaattattcgaaatatgattactttgctagaagaacatccttttgaagacattactattaaaatgatctgtgcttatagtggcattaatcgaacgaccttctacgattactttgtagataagtataatcttttatctacgattcaaacatatcatcttcaaaaatataaaaaattattaaatgcactatacttcagtttcgataaaaatgaaattaatcattttaaactctatcaatttttcaaagtcatattaacttatattaaacgtcactatggatttttccatgccatatttgtctcacaccctaatcgagatttatttacggattatgtaaaaatcactaaagagacgtatacgaatatgcttgtcgattacacgacagtattgaagaaaaaacaatttgtcacgtatgctattggcggacaaattggtattatatacttttggatacgtgaagagtgtatcgaaacacctgatgaactggcacaaattttactagcaaacgctataaaacttagacgctaatatcatatgagtcattgcgcataagcataacattttaaaataattaaagcggtcgagacatgatacgtgtctcgaccgctttaattattcaatactatttttagatggtacatacttaaacacaaaataattgatacattgcaaaataatgagcaaaataccagctatcataataatcgtaatatatggtatataactgtcttcacccatcatgccgactaaaggcgaaacaagtccacctaataaggattgaactaatcctaataaactagatgcactgccgttaccaccagtgcgttcatccattgcaattgaaaagcctaatgtcgccacaccagtaactggtgctacgagaataacaaaaccaataaataacaaccacattgataaatgcatgactagcgtcatcgatacgactgctacaccaataatttgtattatggttaaaattcttaacaaagttagtcgatctatataatcaaccattttaccagtcaattggctagaaataatcaaactgatacctatgactgcaaacataatactaaattgttgcgccgacatttgataaatactttgcgtaataaatggcgaagcagatatgtaactaaacaacataataaatgttacaccttgaatcaacatcggtaatacaaatctaggtgtaattaataattgcttgaaatttttaaatatactaccaagatgtggactgtctcgttcttctaattccaaagattctggtactttaaatagtgagccaatgaccattgaaacaccgaacaacgttaaaataacaaagaccatacgccaagtagcgaacgataatataacgccacctagagcaggtgctatgaccggcgccacaccattcactagcataagtaaagctaagaattttgttaattgctttccactatataaatcactagatatcgcgcgtgatatgactgcacctgcaccgccacagaaaccttgaacaaatcttagagcaatcatgagccaaatattatcgacgaaaataatacctatacttgccaatgtaaataatgacatggctacaacaagtggcgtttttctacctatcgcatcagagattggaccaacaaataaattacctaaagcgagaccaatcataaatagagataatgttaattgtgaatttgaagttgttgtactaaaatctgattgtatttgaggtaagccaggcaagaacatatcaatagataaagcgccgattgctgttaaagcccctaaaataatgacaaacagtaatgattgtttgtgctgcgtttgtttattagtcatttaagttctcctaaaaataattctattcttatcattttatacatattaacaccattatagctttaaccttaccacttttaaatacttgcttgtatattcatttctctatacaaaaagaacgaggttaaaagcacctcgttcttcctcattccaattatttaatattatatggtcttacaataatatagaccaattaaatacctttattaattactctgaatatttaactacttttaaattatctgcatctccatcaccttgtaattgatagtcaacttctccatattgaccattctctttcaaagcttgtccagttacataaaatgtattaccttgtttaatgatttctgttatttgtggttgttgtataaagaataaacggtttgaattcacatcacttttagtcgacttatagttatctgtgtttttcttcaaataagatgatactaaagaaaaatcactttgactatgtgcactattcatcgctgtagtgaaattaccgaaaaaattagtcaccttatttctaaagctattctcttctttttcttttttatctacataggattgtatttcatcatcatcaaaatttaatgttacttttgttttatcttttagattatctgttttcactgtcgtttcagctgacttaaatgttttcttcttagcttcgccttcagcagaaacagtaatatcatttgtttttggatatggaccaatctcttttgctttagcataatcgtaagttttatcgttgatttttacttttacagtgtctttatctatttctgatgcgccacttaattcaacttgaatatatgcctcgttaaaatcttcgctgacatctatcgtttcattattactattattaaaattaaactttaactgaccatcaaattggccattagccgtttcttttttagtttctagtaagtaatcacctggaataaatttacctattgttgtcgttttatttttttcagcagtgactgttttttgtttatcatcagatttaaatttatatgtcgcatcatatttaggtttgacgatagcttctttagtaggagccgtaaaactcatgttatcaaaaattaaataacgtcttccatttttactaactctcaatacattttctccatttttagcagtgacaaaatccgcttctttggtctcgctctcatttaacttcttgattttttgattcacatcttttacaaagttgtccatcccaacctcattttttatatatttaatataagcggttgcttctgtctcatccacattattgttttgtgtacttaggattgtagaaagcttttgtgtatcattattatcgactgcatttataagcaactctgattgtgcttcaggcgaattgaagttttttaataagaagaaaataataataagtaagataatgataaagaatgcaattccccaggggataattttacgtgcttttatatttgcgctttttttattatcttttaatgaacgcgtgagttgttctgagtgattgtcagtgacttcataaccacaatggccacacttactttgtttatctctcatattccccccacatttaggacattttcgcattttatcacctctttatctctaaattcatacatcatcacattattttaacacacattaaaatgaaaccatatgtaagcttgctgttgctactttaattaatccaatatgcaaacataaattgcctattttattctacttaccttattatatgtaacgcatgctaaaaatgatatacatcgttagtccaataacacgattaaactagcattgacgcaataacgtcaatgatcaatatttaagattgctttttactcatcgtatgttacgtcaactaaatttatgtgtggttttttaaattaaaattctttagtcgacgatcaataatctcgagcacatatctcgcctgttcgatttcttcatctgataaatcatgcaacatgtcacttacgatatcgttgatgatagatttactttctcgattgaattgcttacctttttccgttaacttaatatattttaaacgctgatctgtatgcgcttcggctttatcccattctacaacttcagcttgtatcaatttttttattcttcgactaactgctgctttattaaccccttgtttctctgtaattgctgtcaaagtcattgctttttcattttctaacatcaaaatcacgttagcttgttcttttgaaattttatattcttctctcaatgctttcagtaacttcgccatcaatgtattcacatcatcaatgaattctcccataaactcaatatgattacctaaattttttaccatacctgccacctcaatgttccattaaaaatcatttaattttgttttttttatattatgttaatgatatcaatattttattatgtataaaagttaaaactcgcaacttatacttatattaattcatatttttacttggttaccttagtattaataattaaatttgcttatttcgaaagattacactacatttaatatactataaaaatcggaagtgaggcatgggtatgttaactttggctttatgtattatgatattatttacatatttgtgtatgttttttaacttcaaatattcggcacatctctcaatctatatttcccaggtaatattaggttatgttgtcattattatacatattggtgagcatacgctacctatagatattcttgttgtcatgtccttaggcgctctattattacacatcaaacataagcatttaatgcaaaatcgcatgagtgcccttttcttaaaacgtctctattatgtggcttttaagctcgttgttttcacgcttgcatgcttttacattagtttgattcctattggtattaacgttatctttctatggatttcagctatatcttttagcgcgcttttcacttttatttgctacatgatgtgttcgtcgaactttttaaatctgaataataaacctgacttcgatgtcatacttgtcctaggtgctggtatatttacagaaaatgtaacgcctatgttagctagccgtttggatcgtgctttaactttatatatgcaacaaccaaatgctaagtttattgtgagcggcggacaagggcccgatgaacccatctccgaagcgctagccatgaagcgctatttaatacatcatggggttgaatcaaatcatattatgttagaagatcaatccacaagtacgtcagagaatatccaattctctaaatcactcattgagagccacttcgaatgtgtccctaaaattgtctgtgtcacaagtcaatttcatattatgcgtgctttacgctttggacaaaaattcaatttaaaattaactggagttggaagtcatacaccttatcatttttttgaaattgcattaattcgtgatttcttagcattaatgtatcaatataaattattattaacggtttattttgcagctttatttttcatatgcataatcgcatattggtttattccaagtatccctttataacatattttaaatatgtccactgtatcgctacgcgtcattgagtgaataaaaaaatctgagacatcactaaatgtctcagatttttatttatactatttgcggatgtaataaattaaatactttaagtatacattccgttttatcttaacgccctattgcattgtatctaaaataacacatctatcatttaggcattggtaataacgccatcatctaattcaatgactttgtcagcatattcaaataaacgtttatcatgagtaatcatgatgccaatcatttttttacttttaatttgatttttgatcatttcaataacttccgtcgcacgttccgcatctaaacttgcagtcggttcatcagctaagataattttaggatgattcattagtgctctcacaattgccacacgttgtttctccccaccagacagcatatgaggaaaggcagtcaagcgatggtttagtcctatttgttttagtaaagtttctgccctttgattagcttcttgcatagtcattcctgcctctttaccaatcgttgtcaattgtgcttttacttttaaatatggtactaagtgagacgattgaaagataaagccaatctcatttaaccttaattctgaagcctttctatctctagtaaataaaggttgattattatacaaaatatctccactactttgtgaaagtaaaccacctaaaatagttaataatgtcgttttaccagatccagatgcaccattaagaataacaaattcgccttcattcacattgaaattgataccttttaatacaggggtttctgattggccattaccaaatgattttttaatatctttaacttgtaaactcattattctccacctccaattgcttcgataggatctactttaaataatttgataaatgataatattgctccaattatagcaacaataataaatacacctacaactaacagtagatttgatgttgtaacatggaatggcatagatactggcattaagaatgacaatcccgtaataatagcaactgatataatcacgcctatcatcgtcgtaattaatatttgaataattaatgcgcttaataagtgttttgttttcataccaatcgcttttaatattccaatttctggtattttttgaattgtcataacatagaagaatgcactaagtacaatcgctgaaataacaaacaaacttacaatcatcatatttaatggcgcttgttctgcttgataacttggaatttcacttgttatgtcattttctgtaaatactttcacgccagaaatatcattcactttctcttgctctgattttgataaatctttaactggataaatagtgctagcttgtttattcaatgtgttaaatccattatcactcatgatcacaactgaactatgtgaatacatcgtatcattgagtacacctgatacttttaatgctttaccatctttaagtttaattttatctcctacgttaatactatcagcagtaagtttattattaattgccacttcattgtctttagtaggataatgccctgcttttaattcaggtttttcgtttttaaccgtattgatcattaagacgtcttcttcatttttatcaatctttaatgtttgaggtgccatttttaatggttcttgacctgtaatatcttcaattttattttgttgttctggtttaataatcgacttctcaatttgtggttgcttattatctggtaaaacatacttttcggatttcatgttgtctaacattgagatattttctcttgctaatccttgagctaatccacttataaataacaccataatacctaacaataatatgatgagcatgattaaaatatagcgaaacttataatatttgatttcttgccatgctaatttcatcattttcaactccttctttaaaacttatatttggagtttatgctatcaatgtgaactcaatatgaacgcatctaaattatttcattattataaattgtatcgtcgaagtgttacatttataataatcataatacttaataaggagaccttgcgtatgacaacctgtctaattgtcgatgatgacccaaaaatattagaatatgtttcgaaatatattgaacgagagcatttcgaaacaattgtccaatctagtgcagaaaatgctttatcttatcttgaaacacatcaagttgatattgcaattgtagatgtgatgatgggaaaaatgagtggatttgaattatgtaaaatacttaaagaagatttcgatatcccggtcattatgttaactgcacgggatgctttaagtgataaagaacaagcttatttaacaggtacagacgattatgttacaaaaccttttgaagttaaggaattgatgttcagaattaaagcggtacttaaacgttataatgttaatataaataacgaagtttcaatcggtaatctgacattaaaccaatcctatttagaaattcaatcttcatcaaaatcaatgaatttacctaataaagaatttcagttactttttttacttgcttctaatccaagacaagtctttaatcgtgatgcattaattgaaaaaatatggggctttgattatgaaggtgatgaacgtacagtggatgttcatattaagcgcttgagaaaacgacttgaaaaaatagatgcttctgtaacgattcatactgtaagaggattgggctataaggtggatgatcatgtttaaatcactctatacacgaatagccatttacacaatcactgttatgatattctctgcagttgctagttttctctgtactaatattatttatcataactacttaaaagaaaataacgacgctaaaatcatgcgcacattaaaggattcaattcaatatcaaaaagaatcaaggattgaagcatctgcaccctttttcaaacacttgggagagatgaattatcaagtgatgacaatttctgaagatggccatcgtacatattatggcactgaattcagaaaagataatattagcaaaaaaacagctgaatctgtattacatggtaaggattatcatggtattaaaaatttaccctataaccctattatcactggtttttttgagaatacaacgaaaaataccgttggtatagcttatcaatctaaaggacatacatatgctgtttttatgcgtcctgacattggcaaaacatttagtgaatttagaatatttcttgcgattctaatcacattattactacttttctcaattatattggttatttcatctacttatgcgattatcaaaccgatacaacagttgaaacgtgctacagaacgattgatgcatggtaactttgatgaggtcattcatgtaacacgtaaagatgaatttggtacattacaatatcgttttgataaaatgcgcctatctctcaaacaattagacgatatgagacaacattttgttcaaaatgtatcgcatgaaattaaaacaccgctaactcatattcatcatctacttgatttattaaagtttgctaaaacggataatgcacgtgagcaatatattgaagaaatatatgaagtcacaacacaacttagtgaattaacaaaagcattgttactgttatcagaaatagataatggcgcgcatttagactttgatgatgatattcaattaaatcagttgattaaaaaaataattagacatgagcaattttctgccaatgaaaaagatttaattataatgtcagacttagaaacaattagtatgaatggtaacgaacgtttattacatcaagcctttcaaaatttgattaccaatgcgataaaatactcaacaacgggtggcatggttgacgtcacactttcacaaaacttagagacaattacatgtacaattacagatgacggccaaggcatgtcaaccgaaacacaagctcgtatatttgaacgattctacaagtcaagtaatcatgataatagtaatggcctcggtttagcgatagcaaaagcaatatttgaactgcaccatggcacaataacggtagatagtgaaaaaaatgctggaacgacctttacaatcacattcaaaaaggtgcctaagacaataagttaattcgataaaacgatgccctacatttacaacccatacaatgaattaggccgagacacattttgatgtctcggcctaatttaacatgaataaaagatatacaatgcacaatttctacttcattagttcatggcttatttatttgtcatccttaatcaccaataactctagttaattttaagatatttcgtaatctctttgtttaattgcgtataaagtgcttcattctcagataatttcataccgaaagaaggaaccatttctttaattttttcttcccaaccttcaaattcatctttatagcaacgtttcaataaatctaacataatatctaccgcagtagaagcgccaggtgaagcaccaagtaatgcagataatgagccatcttcagaagtgatgacttctgtaccgaattgtaaggtacctttaccttgatcagtatctttgattacttgtactctttgtcctgcaacaacaacttcccaatcctcactctttgcgttcggtacaaattgacgtaaatcttccatacgttcttcgttggataaggtaagttgtgaaataagatatttcgttaaattcatctctttaattcccgcagaaagcatggtaattatgttattaggtttaacagacttgattaaatccatatttgaacctgtttttaaaaacttcggtgaaaaaccagcaaaaggtccaaataaaattgtgcgtttaccatctatatagcgtgtatctaaatgtggtacagacattggcggcgcgccgactggtgccttaccgtatactttagctaaatgttttttggtaatcgcttcatctctacacactaagaagagcccactaactgggaatcctcctatatgtttagattctttgatgcctgttttttgtaataatggtaaacttgcgccacctgcaccgataaatacaaagtcgctttctacaatttctatagtgtttgtatcaagatttttaactttcacttcccaaacaccgtctttacgctgtttaatgtcttcaacttcgtgtttataatttaatgctacatctttatcttctaaattttcaaataattttttagtcaatgcactgaagttaacgtctgtacctgttttatcataactaatcgccatggggatattagacgtacgtccttccataattaaaggcgtccattcagttatcttatctttatcgtccgtgatttccatattactaaataaaatgtttttatttagtctttctacacgtcttttcaaaaagtctacatttttaatcccttgaacaaagctcatgtgaggcactggtttaataaatgcttctggatgatcgagttgcccttgtttcaccagatagctccaaaactgtttggaaacttgaaattgttcattgattttaaccgcttttttgatatcaattgtgccgtctttattttcgctcgtataatttaattcacataatgcagagtgccctgtgcccgcattattccacgcattcgaactttcttcagcaggtgttgataacctttcatacatcttaatttctttctcaggagcgatttcttttaaaatcgtccctagtgttgcgctcatgataccgccaccaattaagatgacatctgttttgctatgttgtgtactcataacaaatacagtcccccttttatatgtgtttaatagaaacgttatctttacttttataatacgttcactaatttagtaaagcgttttctataacttaaaaataaaaaattcgtcttattgccatttatgtatttaacgcaataacacaattacttcatacctctctaattatatacgtaattatcgcatgaaaaaaggggtttcagtaattttacacaaattttgttaataagtgttaactagaatatatcatattttgatgattatacttattaaaacgaggtatactttatttatcacaacgttttataaacaaagaaaatatagaaatccaccacacatttcgtgatataatggatttcaatttaagtaaagtacgcttggaggtttttatgaaatcaatcactttttttatgcataatttttatgcgatgggtggaacggtaaaatcgatttcccaaatcgctaatgttctagctgaaaaaggacatcacgtggaaattatttccgtttttaaaggagacacatcaccttattttgatatcaatccatccattaaagttaagcccttagttaactaccaattacatccctttaattttaaagatatcttatttaatcgtattactaaatggacatccttatcgaaacccaagtatatttcccaacacgaacctggtcttaatcaattttcacattatatagaaaagaaaatgattaaagcaattaaacatgttaataccgatgtcctaattgggacacgcgcaagttttaatatacttatcgctcaacatgcgcctatgaaatgtgaaaaaattggtatggagcacatgaattttgatgcgcatccagaagcatatcaacaagaaatcattaatgcctataaaaatctagacaaattaacaacattaactgaaactgataaagtaaaatatcaagattacatacacatccctacttttgtaatcccaaatattatcaatgaaacacgcttacaagaacaaaaagttaaaaatattagtgccgccggacgtttagaatacgaaaaaggctttgatttactgattgacagtattaatctaattcaagaaaatatgagacaatttggatatcaggtccacatatatggtgatggtaaagaacgaaacaacttatccaagttgatccgtaaaaataacttagaggatattgtttttcttcaaggcgcaacacatcaattaaatgaaaaattagctaaaagtgaactgacagttattccatcccgcaatgaagggtttggcatggttatattagaagcaatgaatcaaggcagtgtcgtagtaagctttgacggaaatgctggtcctgaatcaattattcaaaataatgtaaatggctatttaattgaacatggcaatgtagacgctttagcaaacaaactacgccgtctcattaaccaagaatttaaagatcaagttattatcgaaaatggttatcaaacggttgagaattatgagccaaatgcaatctatctttcttttagacatatgcttgatacttagacattagataaaccgacaatcataggattttcaccttacacaatgcaaaaacgcctacaaagtagacatacatatgactactttgtaggcgtttgttttataataagctattaaaaataaatccatttgaaattaatatctgttttttctatataaatatatttaataagaaagtccaaatacatacgaaaaccagtaaagccacactataacgaagtgtcattttaagtaattctgattctttacctacttgttgtacagaggctgttgcaatagcgattgattgaggtgaaattaattttgctgcaacaccacccacggtatttgcagaaacaagtaacgcaccacttgcaccaatattgcttgctaccgcggcttgaattggcgcaaataaagtattgttattcgtaactgaaccagttaagaatacaccaatccaacctaaaattggtgataataatgggaaaatactacctgttttcgcaattccctcacctactgcattactcaaacctgcataagtcattaatttagaaataactaaaataaaacaaatcgtaatgattggtaaccataactctttaaatgcgttcttgaataaacgcacaccatctttaaaatgtactttattggacatcaaaattgtaataacaataacgattaaaatagctgttcctgtttgacctatgatgtttaacggtaatgtgatcgccttattagcgatttcactatatgtacctggtagtgcaatgttgaacacgaatgattctagcgcaccacctggaacaaacaacgctttaaagaaagatgcactccaaatcattacaactactgttaaaatgacgaatggactccatgcataaataatctctttaggttgatgtttgctgatttttggaggttcttcatctttattaattctaaagatatgttttggctggaattttttagaaaatattgcaagtgccatcattgcacctaatggtggtatgatatctgctaattctgggcctataaacaccgtaatgattgcttgtaaaacagtgaaagtaatcgcaactacaagtatcgctggtagtgtttctttaatacctttaaatccgtctataatccatattaataaaaatggaataagcatattcataagcacaagtgttaaggcagacatagaagaaactgccatacctgtcacactatcgtgtaaacctaatgtgtctataactgtaactggtaaaccaatggcaccaaaagcacctgctgaagcgtttgcaatcaaacacaacatggcagcttgcaatggcgcaaatcctaattgtgtaagtaataaagcacaaatagcgataggtacaccaaatccagcagcaccttctaaaaatccattaaatgcgaatccaattaatagcaattgaatacgttggtcctgagaaatgctcgatatactatcttgaatcgtatcgaattgaccagtttcattcgtaatcttataaagtaaaactgccattacaacgatataaccaatgggtataatcccttggaaaaatccttctacaacagcacctgatgcaatatttacaggtagtttaaagaagacgatagcaataataactgtaacaacaacagttgtgattgatgcataaatgcctttcattttaaaaatagttaaacataaaagaaataaaacaatcggcactgctgcaacaattgatgataacaggacgttatcaaaggggttaaacgtatctacaaacattttgactcacttctactttctacatatatttatgattgtgtataaaaacgattccttattgtgaattttttcacaattaaattatagcatttttttctacccaaattcaataaaaatttagaatattatttttaaaattgcgacaacttataccctaataattacattttaatttacattgctgtaaagaataaatttaaatatagtgagttttgctcgggngttttttattcacggatatcttttgtctcacgtacgcaacatggtaaaataagattattaactattaagtagagggatattcatgataaaacaaattgaaattactgcagttcatgatttagaatctgagctggagaaagctagacacgaagactgtacacactttgtcttaataaatgacagcatagacatatatcaacccatgcttgaggctgtatcattaaaaccgtgtacgattgtagcggactatacagtgaaaaatcaatatatcaacgattgcacatacttcggtaaatcagacattacatttaatgattggatagaaaatattaatcattttccaaatgtgatatatcatatagaaacaacacaatctatcttaaataattacgatattaataatatattcgatttggctctgatatctttaatgcaagatgatgtcattacagatagtcatgtcgtttttaactttaattctgaatttataacaagtaggcgcatttggcatgatattaaaaatctaacgccattaaatactacaaaattcaatttaaacaaattagcttatacgcataatcacccgttgccctttaaaaacaacgaaatattagctcctgatcaaatgcgttttactgacaaatgtttaaatcgcacgcattttaaattaccacattggttatttaaaatgattcaaaatcactttgtaaagaaacaccaaaatatgagctacatatatgaaaaagataaatcaaacattaaagaccatattgtattcttaggttttgattatggtttcagaggtaattctcgctatttgttcaatcactttgcaaaacatttttctaagttacccatatatttcattacgaatgatgtaaatggacccaattttataaaaccagatgaccctaaagccaagtctctcatagaaagtgcccaggttgttattttggaaagctatattccagacaatttaaaaccaaatggtaccattatccaactatggcatggcacaccaataaaaaaattgtttttagacagtatggaaccaacgcaaaatcttaacatttataattatcgagcacgtaaatataataaatggttacagcaagattattttatcagtgactgtgccccaattattgaacactttaaatctgcttttccacaacaacaaactcatattttaaattgtggctatccaagagttagatatttaatggacaaacaatctgataaacattatatttctttcatcaaacaagaacttaaattggatcctgacaaagaaacactattatatgttccaacttggcactcacattttgatgaagttgatttattgcctataagtgacgggttacttaacaaatataatgtgatattcaaaggacatattgaagatcaatcagattatatgcctgaaaatgcaatcattgcacctacgcatattgaagttcaagatttattgttagtatctgatattgtattgactgattattcatcgattatatttgatgccctatcgatagataaagttgtatgtcaatatacaccagatcatgaaaaatatgtaacagaacgtggtgtatatgatgacgtgatgcacgcattatcaactgtacgttatagtgattcaaaagcattgttaaatgatttaatcagtcatcaaatgaaagatgttcatcatactgaatttattaataaagataatcatgcctttgaaacaatttctcacatcattcataaatgtattaaatctaagtaattgagactatgtcataactaaataacaaacaaaaaagtgagccagacttcattaaaagactggctcactttttctaaacctaaattcaatattattgttgataagcagggtccactactctaacagtaccttgttgatcaactgtagctattgtatatgttccaggttgcgcttgattttggaaactgaagatatagctataatttccttcgctaccttcaattgcataatcattatatggattagattgtccatttaaaccattcacttcagttgtagcattatctaaagcattttggaaattcggtaagttttgtaatgcagcttgtgaatcaggtgtaccagatgtaatattttgtgctactggcactgcattttgaccttgatacggcgctacgtattgcgatgtgttggcactagaagcaccattatttgcatctgcacttgcattatcatttgaattactaacattagcatcattcatagcaccattctcgttgccattactttctgaagatgtggcattgttagcattgtcattgtttcctgatgcattatctccatcagcatttgaacttgagccatcactatttgcgttactgtcattgttacttgatgaactatctgaacctgacgcattatccgagctgttttcatcatctccattattgcgatcacttgaactactgtcatcagatttactatctgaatttttgtctgaatctgaattgttatctttgtctttatcagaatcattgttctttttgtcatcgttcttagaatctttggacttatcatcagaagattgattgtcttttgaactatcatcctttttactgctgtcatcatcactaccatttgaacaagcagctagtgctaatgataaagtcaaaaaccctgctaataattttttcatatatgaaaacctccttgaatttataatactcatgacacaaaggttacttagtatgtatcacgctatcatttagggttgatgagaattattatgttattcactataaattcaaaaataaacatctttcatcaaaattctttcaaaagaaaatataaatttaacaaaatcaaaacaatttttaagtttatattgatagattacacatcttcgacaatttaaatcattacacatgttaaattaacatacctaggtcagatgtctctctccattatcaagtcggtatctacaacattccctgtataaaattgatgttcacctgtcaccgacaatccttgctttttataaaaattaaaagcctgtgcattatgttcccacacgcctaaccatattttctttttatttaattcacgcgctttcgcagtggcaaactcaattacttgtttgccccgcccaccaccttgggcatgtggtaaaaagtagatacgttgaatctcaagataagcatccccctttggttcagtttgtgcttcattaatgtttaatttaaaatatccaacaatgtcacgattttccttatagaaataaatgaatgaattgtcatcttttaactcttgtagtaattgatcttttgcataagcctcatcaaagtatgcgtcgaaatcttcatctgtatattcaccatgctcaaacgtcgtcctaaacgtagtgatacttaattctcttaatactttaacttcatctagtttaaccatttctatagattgatccattccgctttcaccccacattatattttattgtcattatactaaagtcgaagacaggttactattttaaaaagcacctgactcagttctaacttattcactctatatagaataaatctacgaattttatgtaatttaaaagtttttttaaattaaaacgctttcttataaatactctaggtttggcttattgtgtaatattcaattacatgataaagtaggtcttgttttttaattgttcgtaatttttatacataagggagtgccattcagtaatgactaacacattcaaagcctttgtagtcgatgaacaagacggcaaagtcgtgaatcaatataaagatatttcagtagatgctctaccagaaggcgatgtacttattaaagtaaaatattctggaatcaattataaagatgcgcttgctacagtagaaaattcaaaaattgtttcttcttatccaatgattccaggtattgatttagctggtgttgtagaacattcagatacacatgctttcgaaaaaggcgatgaagtcatcgttacgggttatgacttagggactagccattttggtggttttagtgaatatgcacgtgttaaagaagaatggattgtaccattaccaaaggatttaacattagaagaagcaatgatttatggtacagctggatatacagctggattagctattgaaaagttagaacataacggactttctatcgaaaagaaagatatactcgtacgtggtgctaccggaggtgttggtacattagcgattatgatgttagattcaattggatttgatgttattgctagtactggcaaaaaaggtgcagaggacaaactaaaagcgcttggagctaaagaagttatttcccgcattgctaatagcgatcaaaaagcacttggcaaacgaacttggcaaggtgtcattgacccagttggcggagagagtttatcacaaatcgtgaaacaattggattacaatggtatggttgctgttattggtatgacagcaggtgcaaaatttgatagctcagtatttccatttatcttgagaggcgtaagtattataggtattgattcagtttatactgaaatgagacaacgcaaacatatctggcgccgtttagctaaagatttaaaaccagataacttacatgatattaaaaaagtaatccactttaatgatattgaagataatattaaacaagtacttgaagataataattcaggtagaatcgtcattgattttaatgcttaatccttaatccttaatccttaaaataaaccttagttttcttttaaaaaggaaattaaggtttatttttttatcgatttaaacgcgtcccttttttattcgtatatgaataaaatgatatctaatataaatagatatgaataaataaaaatcttatattttaatatttacaaccaaaatatgaaagcgtatacttattgatatcgaaacttatcaggagggtttttatgggaattaaagtagataaaaaactcatctttttccttggtgcattgggaggtttactctatggttacgacatgggagtaatatcgggtgctctattatttataaaagatgatataccattgaatagtgttacagaaggattggttgttgcatctatgcttgtcggtgccatctttggttctggtgcaagtgggccattatctgacagacttggccgtagacgtgtggtatttgtgatagctattgtttatattgttggtgcacttatcttagcattagcaccttcaatgcccgtattagttataggtcgtttagttatcggattggctgttggtggctctactgccattgttccagtttatttatctgaaatggcacctacggaacaacgtggttctttaagttctttaaaccaattaatgattacgattggtatcttatcttcatatttaatcaactatgctttcacacctatcgaaggttggagatggatgttaggtcttgcagttgtaccgtcacttattttattaattggtgtcgcatttatgcctgaaagtcctagatggttacttgaacatagaagtgaaaaagcagcacgtgatgttatgaaattaacatttaaagacagcgaaatcgataaagaaatcgcagatatgaaagaaattaatagtatctctgaaagtacatggaatgttttaaaatcaccatggttacgtccaacactgattattggttgtatatttgctttgctacaacagattatcggtattaacgccattatatattatgcaccttctatctttagtaaagcaggattaggcgatgctacttctattttaggtactgttggtattggtactgtgaacgttatcattacgattgttgcaattatgattattgataaaattgatcgtaaacgcttattagtcattggtaatattggcatggttgcttcattacttattatggccgtattaatttggacaattggtattcaatcttctgcttggattatcgtggcttgtttaacgttattcattatattctttggttttacttggggacctgtattatgggtaatgttaccagagttattccctatgcgtgcacgtggtgccgcaacgggtgccgcagcattagtattgtcaatcggaagtttattagttgctcaattcttcccaatattgactgaagtcttacctgtagaacaagtatttttaatttttgcagtgatcgggatttgtgcactaatatttgtcatcaaatacttacctgaaacacgtggtcgtagtttagaagaaattgaagctgatttacgttctagaacaaatgccacagatgcaaatattcatgaatcaaaataatttataaactgacacacataagggtgaatcgccataatgcgactcacccttttttattgccatactatgcttaaaatttgatatacataccacaagaatgaggttctgtagtgataaatccatattgtgcgtataattgatctgctggataatcagccattaaactaacataagtaccttcttcagcttcattttctacatatgacatgatatgcgacataatcgttttaccataaccttgtccttgaaactcagggtttacagcaatatcaataatttgaaatgctgtaccaccatcaccgatgacacgtcccatacctatcaagtctgttccatgatatatggtcacattaaaacatgcattgctaatgcccttttccgcagctttttgtgatttctcacttaaccctgctacttttcgcaaatttctataatcaactacactaggtgcttcatgctttatctctatcatcgtgccacatctcctataacttatgttttctatattatgatatagtccgtaataattctcaaactatccttcatataaataatgatttttgtataaaaaaatcgacaacggtttttccgctgtcgtttaaaaagcatcatgtgctgtaagctataaatattttttcataactaccttattagattctttgaaaatctcattatggctagaaacatagccttctgcttttgcttttggttctatataaagtttagctaggttagctgcattcgcagcgtcactaaatgcacttgcaattaaatgtgctttagcttcatgataaataatgtcaccacatgcatatagaccatcgatgcttgtagcagtattaccaaagcccttaatgctatattcattaaacatatctactttagcagaagattgttcaagtaatgtattctctctatcaaagccatgactaatgatgacatcatcaaatgattttacagtatgttccccagtttcaatattctctaagatgacttgctcaatctgcgtttgcgtttcatcaccaattaattgatgtatatgtgtattcggtaattttttaacgtttaattgttccaatttttctttcatgacttcataacctttaatatcagcttttctatatattagcgttacacttttagcatagccacttaaatcatttgcccaatccaatgctgaattgccagctcctgaaatcaatacatgtttgtctttgaatttttttaatgactgaacgacgtaatgtaaatttgtcaatttgtatctctctgcatccttaatatcgagttgcttcggattaatgatgccgccaccaatcgcaataataactgatttactagaaaatacattacctttatcagtttcaacttcaaagtgttgttgttctattttcctgatatcaatcacacgttcttctaaatttacttctggttcaaaatgcaaaccttgcttaactgtatcttgaattacttcaaaacaaggttttggagctaacccaccaatatcccaaataatcttttctggatatacatgcattttaccaccaagtttatcctggatatctataatacgcacacgcataccccttaagcctgaatagaaactagcaaataatcctgcaggacctccgccaattataataacatcatccataaagcatcctcccaaaattcagcttgtgtctttcctacattatgctataattgataacgattatcaatgaaaaccttttaattttcaaaattcttaaaatttaggagctgttaatctgtgaagaaattgttattaattttaatttgtttgacattatttgtaggcgcttgcagcacacaagattcaagtaaaaagaacgatagtgaaaataaatccactgaaaaatcttttaaggatgatacagctaaagaagttaaaattcctaaaaaccctaaaagaattgctgttttacacccaacttatatcggcgcattggtaaaatttggccataagccgattgccgtaccagaatttgtagagaaaaacaaagtattaaatgatgctacaaaaggcattaagcgtattgataataccagtgttgaacaagttactaaacaaaaaccggaccttatcgtaacgacaatacaagataaaaatattaaaaaattacagaaaattgctccaaccgtagcttttgattcagaaaaatctacttataaagaccatgcaaaaaaacttgccgctttagtcaatgaagagtcgaaagctaaacaatggattaaagactgggataaacaaatggccgacgataaaaaagaattgtcaccattaattaaaggcaagactgtgtcagtattgcaacaaactccaaaaggtactatggcatttagtgatcatttaggtagaggcacagaaatcttatatgatggttatggtatgaagcaacctaaagcgctagaaaaagcaactcaagacaaatttgccacacctattaatcctgaaaatttcaaagattatataggcgattttgcagttattgcgacaaatggtgatcaacctgcaccgttcgaaaacactaattattggaataatctactagcagttaaagataatcaggtgattaaatttgatgttacagaaacacagtataatgaccctatttctttagaaaaacaacgtgatattttttataaagcattaaaatcaaaaaaataatatagtacatctcgtttcatttttactagtactgtagataaaaattatttataaaaaagcaaaagctgccaacaatggtttacgcattgttagcagctttttaattaatcccttgggtctttcactattgcatttcttaataagaagaataatagtataaagccagcagttaaaatcgtatgacctatacctgcatatcccgcaaaagattcaggcacagtcaatccaatgacttggtatgtaccttttgtaaacatcatacctattgtcgttaatacgccaatattataaacaataaagaaccaattaaataaataataactacttagtttaaatacttttacaacaggcaataaaatcaaatgcataaacatccctaatataagggtatgagtatgtactacaacgagttgtgtatcaccagtgaaatgatgtgcaagcgtcaattcacgataatagaaaccactgagtaagcctaaaactgtataaattaaaaaagcatataatactctacgcatagataatcctcctcaagcatattatatgacaattatcttaaaattacagtgacaattcttcaaacatatagaaatactacgacgtctttgctttaccttatatataaccacgtcttgtttatcacataactacaaattaaaaactaagcatcctatttttagcgctagtataggatgcttagcctttatattattaatccagttatgttttacttattttcactttcttccactttatcgatcttatcaactttgcgctgtgaaccaccttcccaactcacattaagataagcttcaacattttttttagcaacttcaacacctataatttgtgcccccatagttaaaatctgtgcattattgcttaattgtgcacgttctgcagaataataatcgtgtgctaatgctgcacgtatgccttttattttgtttgcagtaattgctacaccaatacccgtaccacaaatcaaaataccgcgttcgttttcaccttgttgaatgctttttccaacttcagccgctacatcagggtagtccgtttcagcacattgatgacaaccaaaatcttcaactacatgtcctaaatgctcaacatgcgctttgaccgcttcttttaaatcatatccattatggtctgcaccaattgctattttcattaaaattcctccttaaattttcttcataccttatataaatgttttaaatgtatctagcatcaaataggcagacattgcgccaggatctacatgtccttgggaacgatatcccaaacgttttgatcttcctttattcgatacaatatctttagtactttccataccatgttttgcttcacctaacgctacttgaaatgcatcagcaaacgattcccctgattgttgtgcatgttctaatgatttgtaaaaaggttcaagtgtatctatcatcgttttatcgcctattttagctttacctctatcctggattcctttacaaaaagcaatccaatattgatagagaccttcatcatctaaagatgtctcatttttaacagcaacggcaccttttaaatagccagaagcgtacaatggtccgacagatgaaccgacagcatctaagaaacgcttaccaactgctacactaatttttgaaatatcatcttggtctgccaattcattttgaattgtttctttaacagcttgataaccgatatccatcgttacgccatggtcaccgtcaccaatttttctatccaattcgcaaagttcgtcttttttattttcaaaaagttcggttaaagctaaaatatacgctttaaatgattcatttgttaatgtcataatgcgctcctcctaaatgactttgaaatttggacaatctataggatgatctatacagcgcttcaatgtatcatcaactttcatcaatgtaattgaaaatccacccatttccattgaagtaatgaaattccctataaatgttcggtatgtgttgatatgattatcttttaaaattgcatctacttctttattggtaatataaagttccatttgtgaagtggcgcccaaaccattgattaagacaacaacatcatcttcagcgtgatagatgtcttcttttaaaatattttgcataataacttgaaccgtttctttagctgtgcgaattgttgttttttcaataccaggttcaccgtgatgacctaaaccgatttccatctcattatcttttaaatcaaagcttggtttacctgtttgcggcaaataacatggactcaaaccaatacccattgaacgcgtttgatcgtttgccaattgcgcaatacgtctaacttcttctaaatcataaccaaagtctgcagccgcaccagccgctttataaactaataattctcctgcaatccccctgcgatcatctatatctttggaagaagcgacgtcatcattaccaatcactgccttagtcacaatatcatcttcaatttccgtcatttcactcgccatttcaaaattcattaaatctcctgcgtagtttccatagatataaagtacgccatggccatgatttatttctcttgtaactgcctgtataggtattggcgaaggtgaagcaaaaatatttccaacggctacaccatctgccatacctttaccaacatatcctaagaatgctggttcatgaccagaaccgccacctatcaatatgctaacttttcttttgtcatttctctttttgcctattaaagctctcttatggagttcagaacgtctaatatattctggataagcaattagataaccagacattagttcctcaatcacattatctgggttattaatcatttttttcattttaaaacgctccttttacgacgttgtgtttgacaatattaatttatggtactagaaccacttttagcgattgatctccttttttcatcaattcaaatccttcttcaaaatcttttaaaggtagttgatgtgtgacaacgccatctgtagggaagtcgcctttttgaataccatctataaccaatggataacaataaggtcctaagtgactacccattaaatctaattctttacggtcagagataatactccaatccaccgtgactggatctccaaaaacagaaaattctacaaaacgacctaattttctaattgcacttaaaccttgttctacagacttaggatggccagttgcttcaatatacgtatcacaaccatatccttctgtcatatctttaatttcttttacaacatccacttttgatgggttcataacaatatcagcaccaaatgctttagctaattctaatcgatcatctttcatatctaagacgactaatgtttccgcacccgcttttttagctacgccaaccatacctaaacctagtgtaccggcaccagatatgacaacaaagtcacctaatttaatattggcacgttgaatggcatgcaagctacatgcatatggttcaatttaaaatggcttttttcataaggattatcttctggtactttgtaattaatagcctctttagtaaatttcatatattccgccataccaccgttaacattgttttggaatccataaagatcatgtttttcacacatccaatattcgccgcggttacagaatctacaattccaacaaggtacgatttgttctgaaatcacacgatctccaatttcaaaatctgtaacatcttctcctttttctacaatgcgtgctataaattcatgtcccggaatcataggtgctttaatgtatgaaggttgcttttcatcaccccaaaaacttggtgcaccgccataagcctttatatcaccagcacatataccacatgcttcaactttcacaacaatttctttaggatgttctatcgttggcgtttcaactgtttcatatttatattctccaggcgcgtatgcgactactgcgttcattgtttcaggataatttttcttactcatcattaacagctcccttatcatttttagaaaacgctttcatctatatgtgtaattctaatatactttttcatttatcacaaatattttttcatttattttcgttttgttttctttttgttttcttatatagaatttatgttaatataaaagtgatactaaagaggatgtgaagcacatgaaaatgtatgcagatgaacgcagagaacatatatattcgtatattaaatctcataaacgcgcaacagtaaaacaactatctgattacttaagtgttactgaagcaacagtaagaagtgatttacggagactagaaagtgaaaataaattaacacgtacacatggtggcgctaaagtcacagaanatataggctctaaatttaacttttcttatcgtttacacaaaaacacggtgaanaatataaaataagtaagtccgccttaaaaaaatcaaaccgcaccaatgtattatgattgatgcaagttcgactacttatgaactcgccaaattacttgcagaaactacgatggaactgacaattattacaaatggtctagaaaatgccgtactattaaaagaaaatccacatttaaccgttctcgtagttggtggttttgtttcacaagattcaaacgcgataactgggaatatcgattctcaaattctagaaatgtatcacattgactatttctttttatctgcaaatggttttacgttagaaaatggattaactgatttttcattacctgaagtacaattaaaaaaacaaatggtacaagaaagtgaaaacgtcatcgctctcattgataaaagtaaatttggtgtttcttcaacactttcctttgcgaaaatatctgatattaatgaagtcattacggatgaaaaaccagaacataaatggcttaaacatgtcccgttttcagtaaccgttgcacaataacaataatgaagtttcactgaatcgcacatgcatatggtatatttttaatttcaacatcttacaaacgtgatcactaaataattcgcgacatataaaacgccctacaaagtagacatgcataaatgcaaactttgtagggcgcttttcatttctataacccatatgattcaattttcagttatacgccacctgaccaaccaacagctgtaaatataaaaagtacgatggaaccaactactagccatacgatgaataatggtatcataaatttgaaccatgagccaaagtttgctttagcaatcgcaatggcacctatcgtagcacctaaagtaggcgtaattaagttacctagtccaccaccaaaagataaagaagttaataaaatttgatcattaacacctaatgtttctgttaccggttgtaatatcggtaccatgacactcattagacctgaacctgacggaactaagaagttaaagaccgttgccactaaaaatacgattacggaaacaatacctaaagatgcaccatcaagttgtgttgtaagtgtatgaacaatcgtgctaagaatttgtcctttttccaaaataacacttatcgtattcgccatgataatagcaaacgcaacgaccaacattggctttgcaccttctaaaaatccatcgaccatttcgctaggggttttgctttttacaatataagccaatacaaaacttattccgaaaatagtaataaatacaccatttccgtatttttctgtccatctaaacaaaccatttcctaaagctaagacaattggcgttaagacaactaatgcaacgacgatactgtctctccaattgacttgtctatcctcggtagccatttcatgatgcgctgtttgagttatatcttgtcgccattcacttgtattcatcacactcttactgggattttttattactcttcttgcataccaaacaacatacaataaagtaacaattaagaatacgccatacataatcgctcttccaccataacccgaatacaatgcaacctcaggatatacaatttgtcctatctttgccataccggatggagatactgaaaaagccatgtacaatggtaaaaaggtaatcgctaatgccatgattggatctagtttcaatcgattcactaaaatgacacctaatgttacaaatacaatcatttgatctccgccaataaagaaaccaataaatgccattaatgaaaataagccaataataagtggcaatgcgccggcatgttcaaagcgataaatcatataattcgttaatttttttacagaatcaagatataatatacctcccattgcgccgccgataaacagtaataaggttactgtttgtgctgattgaataccgccgtttaaaatgagtgttatagcataaattggattcactggattttgatcaatagcatgatatgtgccttggataattgaaccatctttattagtatcaaatgcacctgcaggaataatataggtcaagaaacaagcaaacatcatcatgattaacatgattaatagaacgtgaggtaattcgaattttttcttagtctttactgctatattatcagaagtctgatttacattttgattactgacattttgatatgatgttgtgcttgattctgacatacggattcactccttttataatataaaaatagacacaactgtatataacatagatgtgtctatctatataagtacgtatatttaattattgcgttacatgtgactgactatatctattttctttaaatggaatacctatgtgatcacgtaatgtatcaccttgatactcctgagtgtaataacctttttgttctaatatcggtaagacatgattgataaattcatcataaaccgcaccataaatatgtggtccaaatataaagccatctgctgcaccatcttcaaaccattcaataattaaatcggcaaccttttcatatgtgcccatgaatggagaacggcggacagtctcttctaaggcaacttctcgtaaagtaagctgatgttctttagcgcgagctgcgatcgcatctgcagtagcacggaaactattttgtccaacttcgccaagctctgggaatggtgcgtctaaatcatattgactaaaatcatgatgatcataatatcttcctaaataatctaacgcctcatcaatattagctaatgattttatttcctcaaatcgagattcaacttcattttcagtttcaccaataatcggtgctaatatagggtatactttcacttcattaggattacgtccaaatgcttttgcttgcgctttgatactatcataattgctttgagcgatttctttggattcacctaacgtaaatactgcatccgcatatttagctgcgtaagcctgacctttcggagatgcaccagcttggaaaatgaccggttgaccttgttcagaacggcttgcatttagtggacctttgacctgaaaatacttacctttgtaatctaaagtatgcattttatctttatcaaaatactcacctttttccacatcaaaagtaaatgcatcgtcctcatatgaatcccataagccttgaactacttgaatatgctcttcggcaatatcatatctaatatcgtgttccggatggtcacctttactataattatctgcactacctgcaagtggtgatgtaactacattccaacctgcacgtccatggctaattctatctattgttgctaactgacgtgctactgtaaatggttcactataagacgttgaaattgtccctactaaaccgatattttttgtaactggtgcaagggcagccagcaatgtaagtggttcatgtcgatctaaaaaatgaggtatagatttctcatgtatatataaaccatcggcaacaaatacaaagctaaaacctgctgcttctgctctcttagcaatttccaattgaaaatcaaaatttgtactcgcatcatcaggcacttcattcgatttccaagcatgcatatgactacctggcccgttaagcataattccaaaatctattttccctttagtcatactatcccttctttctcgttaatcacatgctttgcaggtgacatttgtttaactgttttcattcgtaattcatgattttgaaccggtatgtgtaacataaattcatctatcaatccatcgacatttaattgttgcaattgttgttttacttcgcttgctaaaccatctaatacttcaatttttttagtttcaacttcaaatgtttccgtactttgttctgtaaatgtgtctaattgttgtttcgtattgactgtaattttccgaccgtctttaaaatgaagtgcataatttgtgcgcccttcttctaccaaagccttatctgattcactttcagttactactgtagctacacccacgataactcttccctcaggatattgtgctttatatgctttaatcgactgatgtaacacgtcaatattagaattaatgaaaaatgcatatacaaaacctactttttcgtcagcagcaaattgtgctgaattttcacttcctccaagtaagtaaagttctggtgacggaatttcattattacgtatagatgtttgtagctgactatatgcttcttcatctgtgaaatcatttttattaaaacgatttaataagtgaaatttttcgttaaaagttgtttgcggagattttaattcagattgtaatgcttgggttgctaaaggaaaaccacccggcgcctttcctatacctaaatccactcttccaggtgcaatattgctaatcaaatgaaattgctcaatcactttaaacggactatagtgttgtaacataacgccacccgatcccactcgaatacgtttcgtttgatttagtaaatgtgtcactaatatttctggactcgttccagcgacttcaggtatattgtgatgctctgcaacaaaatatcttgtgtaattttctgtatcggcaagttgagctaattcaactgtacgtgcgataccatccctaacagtttcatcagtatctattggactttgatctaaaatactcattgatgtcatacataaaccctcccaatcaattttctgaatattatattaatagtaatactatgcctgcctcgcacatttgtcaagtattcctatcgttttaataaggattaaaataacaataatgacaggtcattaattcatgttcatatctgattaatgacctgtcttatatagtttcatttatttataaatattgttggttggtatattgaatagaccttaccaaaactcacatatatgaatttaaataatctatactataacgctgtataaccgccatcgattgtaacaacacttcccgtcacaaacgatgaagcatcagacgctaaatataatgcagcaccttgtaattcttctggaacccctggtctaccaagtggtgtaaatttcatccatgtatcaatcatatctccgccttgtgcgaaataatcttttgtaagttctgtcttcatgtatcctggtgcaatagaatttacacgaataccatgttcagcccattcacttgctaaacttttcgtaaacataatgacagcacctttcgatgtattataggcagcttgaggttgtggcgtattcactataatacctgacattgaagatgtattaataattgatccttttttctgttctatcatcactttaccaactgcttgtgagactaataccatactgttaatattcacatccatattttttacccaacgatcgtatggcatatcttcaaatttcacatgttcattaatacctgcattattaaataaaatatcaatacggccaaatgtatccatgacatctgtaaccatttgttcaacatccgatacgcttgtaacatctactttacatgcgattgctttgttacctgtttcatttttaaattcagcagctgtctccttggccaattctaaatttatgtcagcaataactaagtttgcgcccgcttcggctaaccctttacccatagctttacctaatccagaagcaccacccgtaacaattgccacttggttatctaatttaaacttatcgaaaacactcatattgtaacctccattatttccttatgttattactaattgtaggataaaataattaattaagatagtgcaaacgcttactaaatttaaaattaataaagtgagaccggcatcacagtttctaaaagtgattccagtcccacattcacctcattaaacgtaatttaatgtgaccattctaatgcatgttccgtctcttcatttgtctcaatttcatcgatgtctatcattgattctgaaatatttctcgaatgataaccgatacgttctaatatacctatcatatcaagatataataaaccaccttctggtgtacactcacctgaacttagtctcttaatatgttttttccttaaatcatgctctaaacgataagactcattacttattttcacaatttcatctcgtttgaccctgtcatagacatcaaacatatcgattgttttgtcaaaagatgtcgttacatgatcatacaatcgattgatactcgcttctgctttttcagaaatttgaacttgattcgtttgttcttttttcttatctaataaataagcttcagataatcctgccactttcaatattgttcggtttacatcttgaagtacagtcattctttccgcatcttttttagataatttcttttcagatatcttagttaaatattgacgtacattatcattcatattatctatagccgcgtgtttatgcatgatgtctctttcttttttatcatcatattcatttacattcttaagcatagaaaatgtcatgtgcccaatattttgaatttcttcttgagcctcttggagagcaatgctcggtgctctattaataagatttctgtctaaatttctaggtttatatttttcatttaaatcttcacctggaacaattttagtcactacccatgcgagtacaaaaataaacggtaattgtattaatgtattggtaacgttgaatgtaccatgtgcaaaagcaataaccatttccggttttaagttgagcagactttgcatccattcaatagccatttgatacagtggcagtataattaagaatatagatgcgcctataacattaaacatgacgtgcaccgctgcaacacgtttagctgccagtgagccagcaagactcgctaatactgcagtgatcgtcgtacctatattatcaccaagtaaaactggtaatgcgccatgtaaactaatcaagtcatttgcaaaaaagccttgcaaaataccgattgttgcacttgaactctgaataactacagtcaatattgttcctgcgataaggccataaattggattaaaagacatatccaacatcaattgtttaaaaccttctaaatcagctaaaggtttaactgcgccactcatcagttctaagccataaaacaatgcaccgaaaccaaataggatcatccctatatttttcactttacgtttttgaataaagaatattaaaaatgcaccaatagctaaaataggaagcgcataagcaccaatgtctatacctataataaatgctgtaaccgtcgtacctatattggcacccatgactactcctattgcttgacgcatggtcataaaccctgcacttactagcccaattgtaattacagtagttcccgagctactttgaattaaaatcgttacaatcataccggcaagtacacccatgattggattacttgtaaatgtatttaaaatgtttctaagacgatcacccgcagctgcctgtaggccatcacccatttgtttaattccgtataaaaatatacctaaaccacctataaaagtaaaaataatctccattactgaagaatccatcattacacctctttgaattatttgtaaaccatgttaattgtatctaatttttgttaagtcaatgttaaacaaatattaaaatataaggtcagttagtcaataaatttgtaatcatattgcaaggagataataaatttccttaaaagactggcgcaatcgaactttaccttattgattattttaattaatattaaaaatccgaatcgattttttagtatcgactcaaatttaaaacttgcttatttttattgatgccgctttacgtttatgactgtcatcattttatcaattgaagtgacacataatgataagtgctttccccaattttttacgtaaacaaaaaaagagcctgggcatcaatagatgtctcagactcaaaaatttattatatttatttttatgacggaatttcagtacgtttaccactatgttttcttatcatagcagcactaatagaagatacaataccaaagatgataaatcctacaaacatccacattgtagcattcatttctaacggttgattcatataaagtaattctcttaggtactcaccatagtgtgtaaatggattccaacttacaatataatcttgatagaacttaggtagcatttgtttagggaacataactaattgcatactaaagaacattgcaataaagaatattggtattgatttcatacctaaccaagtcattacgcctaaaataagtccaataaatcctaacagtgcaattgagacaaatacggctattttattaatgtcaggaaaatcaaacccttggacggcagacataaagtaaacatagccaaagccaccaataaatgctgtaagtacacccacacctaattgacctaaagatgcaattaaacggtgagaaattttaatattgtcagatgttctaaaggcaaagaataacaagattgatgccacaattgaactgatccacactggcataaacattaagaaagaagcattaccattaccttgatgatctttcactttgtgcacttgtttatcagctacttttacaggatttgtcagtccttcaatttcattagcactcacttttacatcttgcttttctaaagtatctaaactttgttgcgtgatttgtttatttaaattgtcaccaataccgtttagtacattagatgaaatttgagatgcctgcatatttgcacccttattagttatcgttttaaactctgcacgtttaactttaatatcttgagaagcacctgatttagccatttgactttgcatttgtttggcttgttctggtggtatttcacctgatttaactttatcttgcatttcttgttttttgctatccatcactactttttgagtttgactcatagcatgttttgaaaaatctttttcgaaaatcgctgcgccataatatttttgttcgtctagtccttttcgaacgtctttttcattatcaacctttacccattttactgtatcagaatcactatctaagagtttatcctctaaatttttccctatattaatatctttattttatatagaagtaccttcatcatgattaacgattgctattggtaattccttaggttttggattatatgctggataaaatgcaattgaaaaaattgcaagtatgattagaattgcaataggtgcaatccataataatttacttttaaaaatattcatattaacttacctccttcttaaacaccttgttgattaataactactttgtttattataatgagattgtttcaataaacaatatgcaatgataaccattatgtccgtttttgaacatttttacttaaattgtctattaacgtacaaggagttgacaatatatgattgaagatcgacgcgttcgtaaaacgaaacaagcaattaaaaatgcattcattaaattattaaataaaaaagatttagaaaaaatcacgatacaagatatcacagaattagcagatattaaccgtggcactttttatttacattatgaagataaatatattttattttcagatatagaagatgagtatatcagtgatttagcagatgatatgcttttctacaaagatatgacaaaagggctcaacattgaagctttcgctaaagtcttttcagagaaagtgctaaaaaatatcatggtttatatcaataaaaatatcgaattttatcaaattatttttaaattagagcgaaagagtcatatagaagaaaaaatatcagaactcaagtttgagaatatgtctaagaatgttaatgatgaccatagcatttctggtataccgttagattactttcatagttatgtttttggtgctacgatttcttttattaaacactgggttcaagatacaaatagaaaggaacctgacattgtcgttggctacttatttaaaattatttttaatggtccattgcgcttaatggcaaacggacaattaaaataatgaattgtatgcttgtcaatatcatgtttcttcgctaacattaaaaagaatttcaaagaaaggacatcattgtcttatgataactgcttacaagcattcacaaacccaagaaattgttcatactgaattagatcaaaccgcttcatggataaatgttgttgatccaaattgggaagaaatagaaactttaatcaatcgttatgatattcctgaagatttcattcgcgatccactagattcagaagaaagcgcccgtgtagaatacgatgaggatacacgctactcgcttatcatactagatttacctgttgttaatgacacaaacttgaaagtattgtcatttattacgattcctttaggtattattatcggtaataaaaagattattactgtttgtaatgtagaaaatgaatttcttgataattttgcacgccaaaatattaacttacattttcacagtcgttttgcattaaatatattattgaccatttcaaatcactataacagaaacttgagattactcaataaaacgcgtctacgtatagaacgtgacctaaaaaataacgtcacaaacaaacagttatataatttaatggaagtagaaaaaagtttagtctattttttagccgcgctaaaaggaaacgaaagcataatcaaaaaattatttaggttgccagccattaaacgttttgatgaagacgaggatatattagaagatttagttatagaaaataaccaagcattagaaacaacaagactttatacagatatcttagaaagtattacaacatcatatgcttccttactttcaaatgaaatgaacaataccatgaagacattaacgctttttacagtatttttaactttaccaacattggtatttagcttttttgggatgaacgtcccattaccaatcaatgatcacagttacatctcatggattattgtgatctgtatttcacttatcattgtatcaattgtcggcgcatttttatggcgaaaacaaaagttatgatgcttaattaaaatgtagtaattaaatacacaatcctcattttaaatatgatttcgtatgaatgctttagcacatatatgatcaaaaaggtttgttcatttttagagtaataaagaaaacggtaatttctattttatttcaatagaaattaccgttttcttagtttatgttttcaacttgtaatctataacaacttttagctattttgaaatggctttattcccttttctataagatagcccatatgttaatccaaatgctacgataaaggcgattaacatgcctattccataatgtaaccaaccattatgttggccacttatagaaataaaaccagggattcctgccgtacctaacgcgattgctttcactttaaagaaagatatataggctgctcctatacctgaacctactatcgcaccaataaaaggatatctaagttttaagttaacaccaaacatagctggttcggtaatacctaataatgctgatatacccgctgcagatgcgacgcctttaagttttttattttctttaacaataaagaaagctgctagtgctgctgcaccttgcgcaatattcgacattgtcgcaattgggaaaataaatgacccacctgttgaagcactatctgcaatcaactgtgtttcaatcgcaataaagctatgatgcataccagtaattacaataggcgcatataataatccgaaaatcagaccgccaatcgcaccaccaaattcatacagccatgttaaaccatctgacaaccaatagcctaatgtccgtgtaattggtcctacaaatgaaaatgtgacaaatgcagtaactaatatagataataatggcgtaagtaaattatctaagacagttggtactactttacgtagtgctttttcaattgtcgcaagaatatatgcagccactaacataggaagcacttgcccctgataaccaacttggttaatgtctaaaccaaagagattccagtgagggattgccttaccttcttctacagctttcggataatcataggcactcattaaatcgggatgtaccaatatcatccctaaagctgcaccaagaaaggcgttgcctccaaaccgcttcgcagcactaaaacctattaatataggtaacaatgtaaatggtgcattagcaaggacattgatcatctcagctagccctttaaactggttatgtacgtcaattaatgattgaccatcataaaaaatacctggtgctgttaaaatattattaatacccattaatagaccaccagctacaattgccggtatgattggtacaaaaatgtccgataacattttgacaaatcgctgaaatggattcatatttttattaccttgtgctttcacttcagaagttgtagaagcttctttacctgttatgttttctaattcattaaacactttattcacagtaccagagccaataataatttgatattgaccacctgttgaaaacgttcccttaacgacatccatatcattcaatactttctcatcaactaaactttcatccttaagaacaagtcgtaaacgcgtagcacaatgcgccattgcgtctagattgtcttctcctcctattgcatttaatagttcttccgcagactttttataattcaattaaatccctcctcattaaatggaaccggtaccaaaaatctttatccttattgtaaccggttccaactaagaacgcaatatcccactttaattatttattattacatctatggcaactacaacatattaccctactgtttttaattcttcatctgatatacaactagcataggacttaattctttcaataaaataatcttgtaatatttgtatcgtttgctgatttgtttctacgttacctaaatgaattttccacgctcgcgcaggacattcagtgtcaaaaaattccttatgcaatctcactgtttcacggtttataggtaaatgatatttgttcaatataagtgcagccattttgaaactagcttcttcatttctcataaatgcctcatcatctaaaacaccatttattttagattggcaacgttctatacctacataatgtgaattagcaaatgcgttaccacagtgccattctatatattcagatggatgaaaccaatagcacgtattagcgtctacatagagacatgcccagcctttctctaattcatttctatttattctgcgcttcaaccactcaatgtatgctttagccgtataattttcagcatcatcatgaagtactacgcctaatacttgtaatttaggttctgtgatcttttctgtttgtctataaaattcagaataaatatgttccattgtgaatcctccttcgtatttttgaatttgttttaaaaattaactctcttcattcagaaaaattatccaaccttgaaattgaattgtggtaaatttaatttttagctttaaatcactttgtaagatttaaatttatttatatttaaaggattaaaattttcaactttttataatataatgtattttgttcaatatatttatagcatgttattttattatcaggagttgcttttacgatggataatacaactttatgtattcatgagcatttaaacaccattacacgccgttgtatcaatcaagtgatcttattgttttcactgagtaatcatttagacataactttaaatggaagaaaaatctcagctggaaataacattattatcattaaccatagtgatttatatcaaatatcgaatgcacaacaagtagttgaaatatgcatacctattagacattttataaaattagaaaaacactttttcaattccaattataattttaaattactaaattctgaaccatatttaaaatatcaaattttgacaatggcgcaacaattaaaccaatcatttactattgatacttctctaatgacagaaattatcacgaaattaaacaaagaagccagagtcgaatatgatgcgccttatattccaacgatagacactgaaaatagtttattaaataaaattactgaatttattaaagctaatatttcactacctcttttatctaaagacgtgtccaaatcattctatatctcggcatcttatatttcaattctgttcaaaaaacatctaggcatgagttttaaaaattatattacgagcttgaaaattgccctttcactttccgaacttgttcagaataagcaaaccatttatcaggtttccgaacagtttggttttaatcattattcaaactatacgcaacaatttaaacattttatgcaaatgacaccaaatgaattcagaaaaaatgttcaatctaatcctaaaatgattgttcaacttgttaatgaagatattagcccgtatcaaagtgctatagatacttatacctcagataaaccgcagaccataaatcaaatcaacattgagttaaatcaattaacttttaatgatgctattaaatcacctactgtttttatacacgttgataatttgatggatattgtgcaatctgactacaatacaaagcttagctttaaagatttaacgaatgcctatattttaataaataatagtcgtaatttagcattagaaaacctaagtcttacaggtatgattgactttatcgatgctttattttcaaattatgttggtattgccataagaattaaatccttaaatcagtttgatctcatcgaagatagtatctttcaatttttaaaatataaacctgagtacgtcaaacaaaatcgtgattataatttcctattgttactagatgcgacacatttatctctaacagatattaatcgtttatatattaaaatcaaaaacttcaatgtgaagctcaatattaaagttggcatcacagttgaaggtgtcatagagcagacacactcattaaagaatgcgtcaaaattattaaatcggtttaattttgattttcatttcatcgatattgagcaagacaacgtacaaacattacttaacaaaaaaagtacgcatttcaataactcaatgagtcattttgaatactataataaactcatcgaagaaacacaaattgatgcttcaaaatttgtttatacgaaactatctaaaaaaggttttttactttatgacggaaaacatcccttacaaattacagatttaatgtgccatatgcttatcatgttaaaaagaggcagtggcgtcggctatgaattaatacgtaaagaaaaatatgatatcgccttaatgaataaccatggtatttatgaaccattaatgtacttatatcaatttgttaaacctttcattagtaaatatacagccattcatcaaaactatattattctgcatgaagatcattctattcatcttttattgtttaacgcaccatatcaaagatcatcaacacaagatgttcaaaaattcattttaaaagaaaaacatctaccagctaaaacaacgttgttcattcaaacattgaacagagagcatggatttgttgattatgcattaccttcttcatttaatgacacttatattgaaagatcgttattacgctatattgaagattccacaattcctaaagctgaaataagacacttctctcgttcagattcaccattatacttcactttacatcatgatgaattgaaatatatacgtattttaccatcttagaatcacactaatgttaaacttaacttaatttacatcccaatgaatctgtacaattatagattattaacaaggtatctgaatcatttcattttgaatggcaatgttatagaatgttatttgtaacagaaacaaatagttcgaaaaggagcgttgcacattgaaaaatagtaaagtatttgctatatcgttaagtgtaatcatgttagttatagctgttgtattgattataatgatgttcacaagtggacaaaaagaaacttattacggatatatgaaagatgctacgacagctgataaagtcataagtgaaaaagatcataaaattgagaagaatgttaagttaccatcaaagtctgatttttcacctaaaaaaggagactttgttaaattagtaaaagctgacggtgatgacacttatagtaagatggaagttgtagatcatgacgatattccacatggcttaatgatgaaaatccatgatatgggcggcatgaagggtatgtaaatatatattccacatatcaaattcgatatactaaaatagctatgaagaaatctatagtagtagattttttcatagctatttttacatttatagaaatatgtctcactcaaattaattataaaagcgtgagaagtaaagtcagtttaggaactaaatggccttccacaacagctttttataattaaatcgattttaaatatgcttgtcctttttctttatcataagcattctctcattttgctataacaattgtagacaatgcattccccatgacatttacgcatgttctaaccatatctaatatacggtcaacacctataattaatgcaagtccttctgctggtaagcccatagatgtcaatgtcgttatcaatacgactatagaaacacctggtacgcctgccatacctttagacgctaccatcaaagtaaccatcaacataatttgctgctctatggacatatcgataccatacatttgtgctacaaataatgctgcgattgattgatataatgctgatccatctaagttaaatgtatagccgattggtacgacaaaagaggtaatgtctttcggtgagccaaagcgttccattttttgcattataataggtagcactgattcagaactagaagttgaaaaagctaagattaattcgtttttcaagattttcattaaagcaaaaatactgacaccacatatttttgcaacaatgcctaatatgactactacaaaaaatatcatagcgcctataacaactaaaaataattctaacaatggaattagtgctgatgcaccaaacgtcataatcgttgtacaaataaacgcaaacacaccaataggtgcaagtttaagtatcttgtttatcatccaaaaaacagcttctaatgtacctgataaaaagagctttacaggttcagctttttgacctattgtcgataaggcaataccaaaaaatactgcaaagaatataattggtaacaattcaccacttgtcaaagctccaaaaatattggtcggtacaatattgacaatcgtatctataaaatggttgccatatgtagattgttctgcagcttttgctgaactttcataatgacttatatcccctttaggtaacttatttggctctaagcctgcgcctggtttaaaaatattagcaaatataatgcctaatccaatagcaattgttgttataatttcaaaataaagaattgttttaaaaccataacgacccactgttttagattcaccaacatcagaaatagatcaagctagtgaacaaaatactactggtatcactatcatttttattaaatttaaaaagatgtccccaaatggtttaatataattagcgacgtcactatgaccatagagcaataaccctactatgacacctaataccaaagcaatcataacttgcattggtaaacttattttcttaaatattgtcatgatgtttctccccttttataatatcgactaattataccaaattaaatctttttacacatctattttttctacattttaaaactttatacacttaaaataacataatttatttttgattattatttaagttacataattaaacctttaagacaatcaatacaaaggctttaacaataacatgatgtttttcttaactttaactctttttagtatatatagtaattatgcgattgaattgaaatttttctatttaattttatatttgagtaacataaaaaaatcatacttcttatatatttaaaagccagaaattctaacaaaacagtatatttacaaaaaagaacgaatccataataaatggattcgtcttttttaaatattaacttttaagcgtacttgataatctacagaagtaactcatataatcatttgatttctgtgttattcctaattttaaaggccttcatacttcagctattttatgagctaatccttaggtttgtaatcttgtttaaatgcattgtgcttcgcatctttaacatttttattcgtttcactatcaaaaccttgaactaatatgcctttataagtactaatcggttgaacaacataagtgtatttaggatcatccttaaactctacttttttataatacaatccttttttagcactataaagtgtcttttctgttttaattttttctgttaaatgcttttcgtccatataatggtcaactaagtccaaatttttatgaccttgatacgttctcataccaaagaaaaatacgatagcaataatcaatgatatgaccaatagccctatgatttttaaaaatgttttcatcattaaactccttttattaaaacataaccttctataaacaatgataaatcataattgttgtaactttttatacataaaacgatatgtatatattaaaatccataatgttattattatgactgattacaattcattaataaagtattaaagcacttttgtaacaaaatcttcttaaattcattactcattataagtaaattacgccctgtcatttgttaagaataaatcctatcaaatgagttggttttctatatattgttttgcattatgtattatatataaaatattataacgagggggtaaaagaggcgcacaactgttgcttgacaatagacaacgttcataataaggttaactttcataaggggtgatttataatggaggaaaaagacaacacgctagaacgacaactatgttttcttttttatgtttcttctaaagagataattaagaaatatacatcttatttaaaagaattcgatttaacatatacaggctacattgttttattggcaatcggagtggaagaaaaattaaatattaaaacactaggtgtacgtgtttttctagattcaggtacacttacaccattattaaaaaaactagagaaaaaaggttacgtgactagaacacgtgaaattgatgatgagcgcaatttacaaatagcgcttacaacaaaaggtaaagatattaaagaaccactttctaatatatctaaacaagtctttaacgaatttgatatggaagttgatgaagcgattgacttaaaagaaacattacaaaattttgttaacaagcatttccaacaaaatatttaatttacgatggataagttaaagttagaagtacattttataattatttttgactttacttatctttttttaactaccactgtatttcactatttttgccatatgtagttgtataaatctatttacatatatttatttaatgaacgccctattacaagtggtgtttttttatgtctaatgctttgactttgactttctttgactatagtattatactgtagttgtaaggttaaaggagaggtgattagagatgatacaaaataccagtaatcttccacaagatttattagaaggtttattatcagatcatcatgaattcaaagtaaacgtttatcagtcagataatcaatacacagttgaagctgagcttcctggttatcaaaaagaacatatttcaatcaattatgaagataaaacactaacaattactgcaaaacattcagatgcacagcaagatgatatgacatatcttatcaaagagcgtagtactgatgaacaaagcagacaatttatattcaaaaacatcgatacaaatgctattaaagccacaatggatgatggcattttatctgttatactaccaatcaaacaaacaaaaacacaaatttcaatagactaaatttttataaaatattatttaaaggagagatgtacgatggcttttgatatgagaccatttaacaattcattttttgaaggaaatcctggagatttatttaaagattttggacgtcagttttttgagcaattcccagatagtacaagcattaaatcagacgtaaaagaactagataatgcctatgttgtggaagctgaactccctggttttcaaaaagaaaatattagtttacagtttgaaaacaatgttttaactattgaaggaaaacaagttattgaaaacaatgaggaagatgaagcaggtcgtctaattcatcaagaacgtagtacgagcaacgtcaaacgtcaatacccatttgaaaatgttgatgaaaatgctattaaagcttcatatgagaatggcatgttaaatgtaacattacctaaaaaaacacaagaagaacgttcttcatctaatattcaaatagactaacgataatgaacgtttacacgagttaatttttatagtaaaaatcataacggtagagtcactttattggtgactctaccgtttttctttatgttgatctattgggtttcccctacttacacataggctaataattaaggacatataagcatattaaaaaacccatctccaaaaatttatggaaatgggcaataactttatttagcctattggtagtttagacagctagatttctattttcggattcctctacgcgcattaaatgatcaacaataccagtataaaattgttctaattcttcaccagtgcgtttataatctgtaggatccataccaacaaaatccatatgatcccaatcctttttaactggtaagacttgccaaatacctttttcattagctgaactaatatctgttacatttttataggcttgtccatttggatataaggctgaaatagtaggtacaataccatcatttaatctcaattggtgattcttatctttaccaatgattcgacttgttaaatccattagtggatattgtctaatatttggaacatgtttgccagataatgttgcatgtgaagcttccccagcatatgacgtataaacaatattagggttcagtgaggtattttgatttaattgttccgaaccttcggctgttaagtcggttaatgcattatcctttgtatcccataaaggactattctttatacgttttgagtattcgatataactttcattcgcacgttgatggaagccccattgtacaaagcctaaatctacggttgagaatttattaccacctactttgccaattgtattaataatatctctggcaaattgacgtacacctaatttatctgaaccttgtgtaccattatgtgttgcacctaatgttgtcattgaagaaatcatattatcatgattaccctcgaaaagcggtgatatttctccaccatgttctttttgataatcaatttcttcttgatttccaaaacgtaaatagtgttcaagcaaacgaatcatttggccacccatactatgtccaactaaatgaactttttgacctggttgccattctggcatcacgccagtatatgtacgtccgtatctatcatgaccatatttttcagcatgtgcttgaccataatctacacgaccgcctttgatataataataaagttccgttgctctatcatggttactactgaaagtaccaactgtagcttcatgtacttcataccctgacttttcaaattgctctttgatatggaatttatccccaccccaataattagggtaaaaaacaggtctattttcacctacaccaccaaagaaaccgtgtactaaaatcagcgggtatttgtttttatattcaccttgttttgcagtttttgaatctttaagtaacttatccgcttctacttcttcagcatcagcacgttttcgaggtgtagctgtttcattttcaactttatcttttgctttataaggactatctttcgcgtttggatctaaatctactttttctgtatcaaattttgtttttgtttttaaattattcttatcgccattattttctatacgttgtggttcttgtgttgtttcatcttctgtgaggctttgttggtcttgttgctcattttttgtgtcttcttttgaattaatatcaggcgcagtttctggtttagctttatcttctgatgaagttggattcgcttttacgtctgcttgatcatctactttttcatttttagcatttgatgtttctgttgaatcttcttgagtttcaacttccaatgattgacgtttttctttttgttcatcacttaaattagatgaacttgcttgatggtctatctcactatcattttcatcagccgttgattgtttatcttctgtgttttcatttagtttacctgtatcaactttattatctgatgaatgcttatcagatgcattaggagtgccctgttcatcatcttttgcttgatttagttctattggtggattaaattctgttttttctgaattttcatcttctactttattgctatcttctttcttttcttgattatcattgttttggtttgattcaggaattttttccgtctttatatcttcggtcgaattttcttgtttaattggtggttgttgagatttagactctacttttgtaggcgtatttgagctatcattgttagcttgtgattgatttgtattttgaggttcatcttgtggttgtgcttgaagattttttgtttggtcatccgttgatttgacatcaggttttcatttgtaactgacggcgatattgcacgatttgactcgtctttcgctgaagtttgttcattctttaattcattacttgaagattcacttgcaaatgacacatttccgctagcaataaaaaatgtagccgctaatacagatactgtgccgatagaatattttcttatactgaatctttgcctcgaattaccatttttttggatattgtttttcttcaaaaaatccctctaaattattttttgtgaaactacatcccttgttaataattttccccaaaaattataaataactgtatatataagataacatattttatattgaagtaaattaatttcaattattaatacatttctttaatgcataattgattaaaatctcatttaaaaagcaacttttgtatagttaaatgtaattgctaatcattggaaaaattaaggtttatttctttataaaattaaaagtaaacctaaatgcgatttcgatatcatttgttgtgtttatcagttttatcttatataaaatcatcaaaaaaggaatcctcttattcaactaataaaaggattccctgactcatatatttattaatggaatggtggttttcccaacacatcttcatcaaatctttctggtataagtacttttctcatgataacacctaaatcgccatcttcactttcatgttcattataaatttcatatccacgttttttataaatatctagaagccacgggtgtttacgggctgaggtacctaaagttacagctggtactttaagtgtatctcgtaaaaatgtttcttctacatattttaacaatttactacctatccctttaccatcatatgaaggcttagttgcaaaccaccacacaaatggatatatggaaatacgtcgtttactttcccatggaaaacgcactgttatagttgaaatgatttctttatcatcttctaatacaaatgtagtattttttgttagattatcttttaccaaagctaaatcagcattgacagatggccaatcaattcccaattctcttaatggtgtaaaagcctcatgcataagttgttgtagcgcttctgcatctgactctgttgcaattcttatattgtaatcagacatgttgtcactcctatcattcccaagcttattaagtcattaaaataaaatgattttcataaacttacttttaaattatataaatacaatatgtcttctttataatcgagtcaattgatatgttttagaatatagatctaatacatacgtgaaggcaaagcaatcacactttgctatcatgttttcgtgaatctacgtcaacattaattgctgtttatagcgtcacaagtgttaaagctattgtgtatacattatgtatttgtaaatcaatcagttacagtactattgattaaattttagaaatactatctgttttcatagatgctcattttatgatttactatgccaactatctcttctcccattcaaatatgcataaactaacccctacgaaaatacctccaccgataaaattaccaataaacgcgcagacaatatttttcaatacatgtaaccatgctaccgcgtcgaaatcataaaaaaccatacctaaatataacccagcattaaacacaacatgctcgtatcccataaatacaaatacaatcactccacaagcgatgaaaaatgctttggataaaccatctttaaattgaattgatacatagatgccgatattaataaagaaattacaaaaaatcgcttttactaaaatcgcataccaactactatcaatggttttgccgtcgaccatactagttaagctactgatcatttctggtgtcataataggtgtaaatttcattaatgcaaaaagtataaaaccaccgattatattaaataagaaacaaaccaacataatacctaacgctttattcataccaatgattttataataccaacccactgtcagatacataaaattactagttaataattctgaattagttaacacaatcaacaccaatgctaaactaaaagaaatggcgcccatcagattcactaaaccttcattcgttcctgcaaattgtgttttgatacctagcataaatactgtaacaatagctaatagaaatcctgacataatggattttagtgcatagcgtcctggagtttggctaaacatgacttctttcatttgtacctgattattaatattttcaattgtttcttttgacgtatatgtatcgtttatagacttgccattatcaaccataaatcattcgcaccccttatcaatttttaaaaaatcaaattttgctaacaatattattataagagtttatacctatacttaatagtcgttttagaacattttattaaattaatacattgcacgtttaaataatatatcgtaaactctacttgtaactaaaatttacacaagcactagcaaaaggagtcttaatcttgaacactcaattttctgtgtccatacacattcttacactattagccactgaaaaagaaccagtgtctagtcaatatatagcagatagcatcaatagtaatgccacactagttcgtaaaatatgtcgttatttaagagacggtcattatattcaaagtagtcaaggtatctcgggatacagtctatcttcttccgcaaatgacattcacttaggcgacctataccaacttatcttttcagaaacaatgcatttcgcaaaaattcataaagataccaatcaacattgtcatgtaggtaaaaatattagccatgcgctagatgaaatttatagtgaagttgatacaaccataattaataaactaaacacgtatacaatccaatcggtcattgatcatttttaaaaatgcttacgtaacttactttttaatgggttatacaccatggggaatcattgatattatttcatttacaactggagaaatgaaaaaacgttatggtctcatttatgtagatagagataatgaaggacatggtactttagaacgtaagaaaaaagcttcctttgattggtaccgtaatgtgattaaaacaaatggtgagtccctcaattaatattataaataaaacagcctgagacaaaatagatgtctcaggctgttttcaattagtcagtagatgactgaattaaaatataaagactcacttgtttaaagaaatgatttttccattcccatggaaacgagacgctctaatgcataagccaaagcctatataccacatgaaatttctagaaagacatatacatgagcattagttcaggtgaacctttatacaagtcatcgttgccttgattgcataggtgggagtacgaaatctctattagaaaatttgatttctgcccatcccctttttggttaaacaactatagtattattgtttaaatttacttaaaaaatgtagaccataggcaaaaataccatatccagctaatgtacgtaagaaccatttaaatgtatgactacttaaggttttttcatttaataatactgtaggaattaatgtactaaatgaatacaaaccaagtactttcatgtaacgtttattcaatacacacacctcttttcaatactattatatcgaaaaacgctaaatgattactatgccaattacaacatttttttgaagttttactgttataaagtttctaataatgtctctaagttatcaaacgtactattcataccttcttcgacacccatatctaataattgttgtgccgctttagggtcgggtaatacagcaactgaagtaagctttgctacaccattatcgttatcttcaatatgaatcgtattgtgcataccagccattttttgatcaatattaccatctttatctgcaaaataatcattataatcaatcagcgtgggttgtatcacttcggtatattgcgttacagtatagctcgtaccttgtggtgcgcgtatagcaaaaaaggcattcccacccgtttgtacatcagattcatacacttctgtagtggcaccttgtgggtgaaaccatttttcaaataaattttggtctgtatatgctttaaaaatttgttctgcagtagctttaaattccctcgtaaatatgatgttattttctacaatttttacactcatttatgattctccttcattcattattatatatgatgttattgatttaactttggcatctttacggtgacttgtaaattcaaacatatcagcaaaataaatcgttgtaccattttccaaaatctgcgtaccatgcaatgcaccagatttaccgtgacttatattcattttcacatctatggatacaatagtttctttgtggtcttcaagctcttgataaaatgcgtcaaatccagttaattgaaatgcgtctactacttcccatttaaaatcctctgcaacgatcgcttgcaatttgtctttatccacaagtgctgagccaattaaaaaatctagcatgactcttctcttaggtgcgttatcacatttcaaatcaccagttaagtgaaatggcacatcaaatccaatatcctctttaaaattcatgttatgttttttcaagttatcttccaatatatccattgctttcggtcctacaccatgtattgctaataatgtcgttctatcatatccagcaatatcttctaatgtttttacccctatatggtgtaatgcattcgtcgctggtttccctattttaggtaaatctatcgtcattttatcaaccccttctttttaataactatacccaatttaaacattaatcaaaatttatactatcttttattataagatagtgaaaagagggattatatgtcaatatctgatcaaatgatgaaaggattgttagatggagctattttaggtttaattgcacaaggcgaaacttatggctatgaaatattagacaaattaaaatcacaacaatttccagaaatcagtgatggcagtatttatccagtattattacgcttaaataaaaaaggttatgttacaagtgtttctaaaaaatcgatgactggtggacctaaacataaatattactcaattactgatactggtaaaaatgaattaaatcaatttaaagcaaattggcattatttgaataatggtatgaataatttgatgaggagtgtaaacgatgttaactaaaaaagctgaagattttttactaaagctgcgtatcgaattattatttcgtgataaaacgaaaaagatgttaacgcgattgaagaagaattacgtgaccatattaccactgctgaagcacaaaacgaaaatgtcgatgacttattgaatacacctataaaaaactatgccgacacattttcaaaggaactaaatttaacacaaggtatttataaatatatattttatttcatttctttcatgattattatggtagtcattcctaggatgcttgataactcatttcaactaacgttagcgctcatgctttatatactatttatatttataggttctttagtacttatattatttgtcattaaaaaattaattatgacatggggagatagtaaaaagacttatattgctgtcggtttttcatcagctatcgtcttcggtatttatatattaagtgagtatttattacgacattatccaatatttattttttggtcacctaatcaaactactaattttattattggcataatacttttattactaacaatggccatttgcttgctattaaagaaaaaatattttgctggtcttattttaatcttaagtctgcctaacataataagccggatatttactggcggcgattactctaataaaaatttcttaatcatttcatctattgtattaacaattatctctttatctttcattgcttatattgttgtacaatattatcgtgacaaaaaatcaatcgacaataattaaatataaaaagctactcgattaacaatttgtttcaaatatagaccaagctactgcattaattttgtgttagtttggtctatttttttatcgtttgcgtaattcaatgtaataaacattacggctttttaatttagattttctcatgtttttaatgtattggcatttatttggaccgactcctacgggaaaagcactagccgaagactacaggttatggcagtgccaacggaaagcgtgcacaaaaaaactgccgacaaagtcaaagactttgtcggcagtctgaacctactcgataatctagtagttttttatatagtttagtcttctaatgcgaattctaaactcacttggaatttcacatctttaccaatcattacgccaccagtttcaagtgcttggttgaacgtgataccatatttttcacggttaatagaaccgttaacaataaatccaaccgttgttgcaccgttcattgggtttttactttggccttcatatgataagtcaaaagtttcttcattcgtttcgcctttaattgttacattacctgtgattgatttttcatctgctttagtaatttcaaatttgatttctggattattttctacatctaagaaatctccactacgtaaatgcgcatcacgatcatctacacgtgtatcaatagagctcgcattaattgtaaaatcacctttaattgtacttaaatcattaatgtcgccatcaatatttgcatcaaactctgtaaatctacctttaatatttgaaatcattaaatgttttactgaaaattctactactgaatgtgctgcatcgaaattaaattttgtcattatcactatacctccaaagtattataagttttgtttatacatttattataccaagtatataaaatatatcaaacaaaaatcttaaatattttcttctaaattcattattcccatttctgaataaagtattcatttgaagattcaaacaattgtgaaggttttattgaaaattatcattcttaatgagctaacatttcctctttaatttcctcgctacttaacgaatttggataatatgttggccaattatctaattcttttaaaattttatctttattattgcccataaaaatatggaaatgtgcagcttttttcggttcaatattatgatcactgaactgtacatatttaggtaaatgactattttgatctactaatttaaaagtatatctcacacctctgttacctttttcatattttaaaatatctttgccatcatatacatatttcccagtttcttttttaccatctttttcaaacgttattgtatcgtttgaaatagtaatatgacttatatctgttttataacctttttcataatatgacttatatgctttagcagacatggaatcatcatcttctgctttatgttccataacttcatccaaagtgccatcttttaagtaaggataaactgattgccagttgcctttataatcacccaatgttctatctttaacttggctatctttaaaataaccgtcagaaatcgctttatcatgtttactttgttccttatcgtcttcagtttgaatagaatcacttaatgctttatccatatttataatatttttcttcatcaatgattgataactcaacttataatcttgttgctgcgatttatttaaagattccatattataaaattttaaaggttttgcctctgtttctttacgtattgtgtctgtcactttatttgatacattatcttcatataaaatatatttagctccagaatctttaatttctttcacaatgttcgacaatgatttttgtgaaggatcttcagcattcatattttgtacacctttttgaacaaaatcatatctttctgcaagatatccaatagattcatgagatataaatatcgtattaccttctttattttcagtaatagatttcaaatctttatctatttcttttaaatccttatttaatttttcatagtttttttcatatgttttcttgtgtttaggatccttcttaattagttcatctttaatctctttagcaaatgtctgatcaaatttaggatctaaccaaacatgaggatcgtatccgccatgatggtgatgttcatcatggtcatgtccttcttcttcatgactatgttggtccgtaagcaattgagatttatctaatttatcttcaagtgctaattttttatcatcttttttaattgtacttgctacttttttagcaactggatctaaattgtcaccagtatatagaaataagtccgcttttgatgcattaattatatctttttgtgtaggttcgtaattatgtaaatctgttccagctgggtagatagaattcacctctacgtgtttaccacctatttgttcagcaaatgacttcaaagggaaaacagttgtatttatttttattttttcattcgattttgtattatcggactctccttttccacaaccggctagaactaccatgaatgccagaaccataatactaatgtatgtaatttgtttcaattttaaaacctcctaaatagtaattgttacgatttattattatatgctttcttcctcataaaaacaatactaaatataaaattttcgtaattattacgatttaatgctgagaaaaaacacagacaagtaaaatcaaaaatgtgattatacttgtctgtgctcatttcaacttttagttaaatttctactctttttctaatatttttttgtaattctcaaaatcataaggatcttctactttttggccatggacgaaaacagtaggcgctgtttcaatatggttatctttatattgcttttgatccttttttgcagctacccaagatttactattttcttgtttatagtcgtctttgatttcttttttaagcgtcgtattaattttaagtttatctatttgttgatcaactatttgatttgtaatccatgctttttctgaattaggttgttgtttaaacattaattcttgaaattttaaatattgttctggtgctagcctttgtacagcatgacctgctcttgaaccaataatagaatcatcacctaaaaatgccatattaacaaattgatagtccactttatctgtatcaatatagtgctttttcaattttggcattacatttttttcgacttttttacaatatgggcacttaaaatcgccatactcaataatctttattttcccatcagacgttgttttatcatctttatgtgtatcttctgggttggtacaagcagttgctaatacaagtgtaagcactagcacgattgataaccatgcttttttcatttattacacctcaatttcatttactcgttattcgtctaaatccatattttcttctttatagtctgggtcatgtttctgtatatagccttttgaattaaaatcttttttaaatgttgttttaccatctttatattcataagcataataatgaatctcttcatcattcttaataggtttataggcaatgattacaaattcgcctttttcatatacatatatattggcatcttttttgtcaaatttgcgttcaatatcacctttgtgttgttctgcaagttttttctgataatgttgttgtttatttactgctttatctattttatctgcatatttaccactactacacccagcaatcattaatgtagagatgacaattagcgttataatctttttcatactttatttcactcctaaaacaatcctctttttaaattaaatactttgatatacattataaccgtaagtaatatcatacactgaattagcaaaatgtactataatatttttaaagtatatagcctaccaatgtgatacactatttaataaaaatatttttaatattgcaatctgtttttttgtaaaacatggcatttaatagtaaatttggtatactacttataagttgtccaactcaatttcaaaataaacgttgccatttaaggaggcaaaatatatgttctttgtgaatcttacccctgaagaattccaaacattcacacaaaatcacttttcacattacacacaatcacgtgttaattatgaagctcaatacaatgcacacttgttaggtgttaaagacgacaatgacgaagtcattgctgctggtatgtttacagaagcacgcgcgctaaaattctttaaatatttttatagtcaacgtggacctatcttagactataccaatttgtcactagttgatttttactttagcgaattaacaaaatatcttaaacaacataattgcctatacgtattacttgatccgtatatcttagaaaacttgagaaatgctgatggcgaaatcaagaaatcttacgataatcgaatgcttataagcactttagaaaaactaggttataaacatcaaggttatcctgtaggttattcaaaaacgagccaaatacgttggctatctgtcttagatttaaaagacaaatcagaacaacaattacttaaagaaatggattaccaaacgcgacgtaatatcaaacgtactgaagaaatgggcgttaaagtacgtcaacttcctatagaagaaaccgatcgttttttcaaactatttaagatggctgaagaaaaacatggcttcagcttccgtgacgaaccatactttgaacaattacaaaaagattaccagggctttgcttcaatacaattagcatatattgatttaagcgaatacgttaacggccttaaacaaaaactagacacattaaatcatcaaatgaaagacgtggaagctgcattacaagaaagtccaaattctaaaaaacaaaaaacgaaacaaacacaacttaatcaacaaattgtcagtacacaacgcaaaattgatgatactaataagacaattacgacggatggcccagtcttagacttagcagctgctatctatatttataatgattatgaagtatattatttatctagtggttctaatccagactataatgcctatatgggtgcttataagctgcagtgggaaatgattaaatttgcaaagaatcacaatatcgatcgttataatttttacgggatcactggtgactttagtgaagacgccattgattatggcgttcaacagttcaaaaaaggcttcaatgcagatgttgaagaatatattggagattttgttaagccaatcaaaccattactctacaaactaggaaaacgaattggaaaattatagcctcattgtgtaactatgaaataaaaaaggtttaggacatgttttgatatgctcccttcaaagtagacatttaaaaaatgaaaactttgaagggagtttttctatgtctaaaaaaatcgttgatctagatttattagaattgatttttgctaaatatgaaaatggtatgagtttcgaaaatattgtagatgtagttgatattgatatctctccaggccatctccgatacatgtacaacaaatatttaaccaacggtatacaatcttttatacgcaattcacaaaataataagtatacacttcaatttaaaaagaatgtggttcaagagtatttgaatgatggcatatcttataaaaatttagccattaaatataatatttctgctcatgaaactgtacgtagatgggtaaatcgttatactggaagaaaagagaatatcaattcttctcctaaaaatgaggtgtatacgatgaagggtaaaaaaacaacattccaagaacgtcttaaaattgtagaatactatttagataatgaaattaattataaagactgtgctgaaaaatacggtatcagttatggtcaattgtaccaatgggtacaaaaatataaagtacatggccgcgatggccttcaagatggtcgaggcaaaggcaaacctaaatctatattaacaccagaagaacagaaagaagctgaaattcaagctctaaaaagtcggaataaaatactagaaatggaaaataaagtactaaaaaaatatcaagaaatagaaagagagatgataaaccaaaaaacaagcaaatcgtcgcatacgaaacgattgaaacgctaaaaaatgaatttcctattaagcatttatgccaaattttaaagatttcccgtgcaagtttttataaatggttacatcgtaatcccacacaaaaagaaattgaaaaccaagtattgttagaagaaataaaacatatttataaaaaatataaaggtatttatggatataggaggatttatatttatattcgcctatatttacagaaagaagtaaaccataaacgtgtttatcggttgatgaatcaactgaatttaaaagcagttattcgccgaaaacgtaagcgctataaacctagcaacccacaaaccatagccgaaaacgaattaaatcgtaaatttcaagaaagtaaggctaataaaaaatggctaacagatgtaactgaattacaacttaaaaatggaaataaaatatatcttagtgcgatatatgatttgggatcaggtaaaattgtaagtcatgtattaggaagctcaaataacaatcaactcgtatttgaaacatttgataaggcagttaatactgtaactgataccgaaggtattatatttcatagcgatcgtggttttcagtatacatccagattatttaaaaataagttaaatcaacataatatgatacaaagtatgtctcgagttggaagatgcattgataatggacctatggaaggtgtttggggaattattaaatctgaaatttataggggttataaaaactttaaatttgaaactatagaacaagcgtttcaagttatcaatgagtatataacattctttaataatgaaagaattacattaaaaatggctaatctcgtataaaccgagattaaccgataatttaattatttatttgtctacttgacggggtgcaattcagtttgtcgcagcctctcattatttgattttttaattagaactgtttttgaacgtaaatgattttaatgagatttcgagtaatacaatgaaaatcgtcgttataatcagaatgattatataaggcatgacactatattctccttttaatcccacaagtggcgacattataccacctaatataaattggaataaaccaagtaaacttgatgcattgccactaccgccagttctagattccattgccaaagtaaaacttaaaggtccgattccagtaacaggacaaacatttaagaagaaagcaatgactaatacccaaagtggtaagtggaatataagcgtaaagcaaattagaataacgccagctatttgaatcaaggttagtagtattaataacaaataacgatttatatattcaactaatgtagcggttaactgactcactataattaacccgataccgttaattgcgaataaaatactgaattgttgtggcgtcatgtcataaattttttgagtgataaaaggcgcagctgatgaaaaactaaataacatcacatacgttaacccttgtagtaacataggtataatgaaagctggtttctttaataaggaaccaaaatctttaaaaatagctgaaaagttaagttttgagagatgtctacttcttgtttcttccattttaaaaaaggcaaataacaaaattgcaaaacttataatggttaatattaaaaatattgctttccaatttgcgatagttagtgcatatcctccaattaatggcgcaatgatactgataatgccattaacaacaagtagagacgctaagcctttagctaacgcttttcctttatgttgatcgccaatggatgctttagcaatgacgatgacgccaccgccagttaacccttgtatgagacgaagtgtaagtaagatagacagcgaagtcgtgaacacggctattaatgaagcgatgacatataatgaaataataattaatgctacttttttgcgaccataagcgtctgatagtggtccgaagataaattgtccaactgcaagaccaatcattgcaaatgaaagagtgagttgtacttgtgaagccgttgtgtcaaaagcattttgtacatttggaagcgatggcacatacatatctatcgttaaaggaccaaaggtagtcatgattcccaacataatgatgatcatgatgggtaatcggggatttgaagttttgtccatatataatactccttaaaaatcggattaaagtatagtgtgaaaaacggataattcttaactagactattatcccatacgtaaagataaatgcaatggggaaaatttcttgtagaaatgcaatgtatgttgcatgatatcaacattgttatataatacaatagattatgaataaatttaatgtagcatatttacaatgaatcacaatacgaatcatttaaatcacacaattgagatacaagatagataatgtttggttataaaggagtaaatgaatgagcttaagtaaaacacaatatgaagtaattaaattcatcatagtaggtggcataaatacgtttaattattatgtggtctatttaatattattaaaattattaggtattaattatttaatcagtcatgtaagtgggtttgtagtcagctttattatttcgtattatttgaactgctattttgtttataaagtaaaacctacatggcgaaaatttatacaatttccgttgacacaggttgtaaacatgggaatgcaaacaggtttattatacgtatttgtacaatggtttcatatatcatcggtcattgcaccgtttgctggattaattatcacgattccaattacctttgtcttatcaaaatatatattaagagacgagtgatacaaagttcctgttataaaagggaacaccaactttatttagtctttttagttgaaggaaacaaccaagaaatcaatttctaataattaatttcttaattgtttcctttatttttatgcaatttgatagtgatttttaggaaaggctaaataaataattaaaataattatattaaataattttataataaaaaatgttgtaaatgttgttttgatgcgtcataatatattatccaatatcaattaaggtggaaacagacatgacacaaagtgagaatttaaaaatcgctcaaaaaggcgcatatcttagtttaattgtttatatcattctgtctatagtaaagtattttgttggttatgtatatgactcagcagcagtaagagcggatagtttaaataatatgacggatattatcgtttcgctagctgtaattataggattgaaaatttcaataaaacctgcggataaaaatcatccatacggtcatttaaaatcagaaaatatttccacactgcttgtttcatttattatcatgtttgttggtattcaagttgttatagaaaatttccctcgaattttttcaggggcacatgcaacaccaaatgcaatcacgatttatgtcagtgttatcagtggtgtcatcatgatcatagtcttctttattaatcaaaaattagctaaacgtacaaatagtagttctctaaattctgcagcaaaagataacttgtctgatgctttggtcagtattggtacggctattggcttagtatttacacaaatcggctttccaattgtggatataatattagcgacaatcttaggcctacttataatatatacaggctttggaatttttaaagaatctatcttcactttgagcgatggattcaatgagcaagaattagatgcatataaaaattatgtcttagaaatagaagaggttattgatgttcagtcaattaaaggtcgatatcatggcagtagcatctttgtagatgtcactattgtagtggaatctgatttatctttggaagaagcacatcatatttgtgacaaagtagaacatcacatgcatgaaaaaggtatttcttcagtttatgtacatccagaacctgtttccatacaatgaaaaatgagcgtgtcaatatgtgacttgactgtaaaagcgtttgagatctaaatattcatattttaactatcagttattttgtatataaaaatgatgttatcaaaatcagttatgctcttacaaaggcatttattgctttcttgagtagctttaaatacaggcctaattagaatcaataatgatttgatatcatcgtaaaaaaacagcaatttctattttattacaatagaaattgctgttttcattagtctaagttatttattttaaagtcactctcgtgacatgatacttaccaccaaccgttagctaaacggaagtcaattgctgcatctattgaaccataacggtcttcagcatatttaatcatacctttagtttgttcttcaactgagccttttccccaagcttctttcgtttgtcctaaacctctatatcctaattcatttactgcatcaggattaccacttgattcaggcattacaatattgtcccataatgctttagttccaccagcttcgataaattggctgtatacatcgctattagattgagatgattgttgtactggtgtttctgcagcatccgctgttgatgttacgccgtatccagtagctgcaattgtaattgatgcgaaagatgctaataataattttttcatagtttaaaaatcctcctaatgaatgtacctgtctgttttaatataatgaacaggtttgtgttctaatttgtttaaagtactatttatttaatttactgccttatttgctttgctttttttcaacgattacaactataacacctaattttataacgtaggttacagtaaaataaaaagaaagtatcttttgtgaataaaggactacaattatttcaaaagctattgtaaattgttataattttaatatatcaaagcaaagacgacagcataaatgcgattattaaagtatttatgggatatgttatgcatatgcgaattgtaatattactgtaaatatcgcaaaaaatttaatttcacttaatgaaagaaggaatattatgccaaaattaattttatgtagacatggacaaagtgtgtggaatgcagaaaacctatttacaggatgggcagatgttgatctatcagaacagggcgaaaatgaagccataacatctggtaaaaaattaaaagcacaaggcattgaaatcgatatagtttatacatctttactcgaacgtgcgattaaaacaacttatcacttattaaatgaatctaatcaattatttattcctataattaaatcttggagattaaatgaaagacattatggtggtttacaaggactaaataaagatgatgcacgtaaaaagtttggtgaagatcaagtacatatttggagacgttcatatgatgttgcaccgccaaaacaagatgaagcacaacgagaaagttatttaaatgaccgtaaatatgaacatttggatagacgtgtcatgcctgaatctgaaagcctaaaagatacgttagtaagagtgataccgtattggaacgatcaaatttctcaacaacttttagatggtaaaacagtgttagtatcagctcatggtaattcattacgtgcattgattaagtatttagagaatgtttctgatgaagatatcgttggatatgaaattaaaacaggtgcaccattaatatatgaacttacagatgacttacaagttatagacaaatattacttataattgaaagtaatagtaaatagcctttaaaaagcaaaccagtcagaaaaaataattttaataagagtttgtagtagtagggcaccaaggatagctaatcaaataggttatctaaaggaagataattattatgcatatgtttaaaagagtctgagacaaaaatagatgtcttagactcttttaattgtggaaaaaatagttggatattaaaaataacgtggcatgtttaaaatgacagcgacatgctatgaagataaattatttactacgcttatgttgttgaataattttgcgtgcgcgtttacgtgttttgatattaggactatttaaatttctacgtgctgtttgtaagtctaatttcatacataaaacctcctttatagaaattgattatgaattaaaaagtacgttttgtaaatagtaattattacgatttacgattaattttttatctaataacctaatttgtaaaaattaccatttttttgagttattttaatgtcagataaacattttatatgtataatgcataaatgcgacaaataaatatgctaaagacgaatgtgtaaataggagataaaaatgactcaaaaaacaaaaataattatgattctaatgatgttgtttggtggtttctttggactattaaatgaaacactgttaacaaccgcattaccgagtataatgaaagattttgatatagattatacgcaagtacaatggcttacaactgcctttttattaacaaacggcattgttgttccgttatcagcaatgattatacaacgtttttcaacaagacaagttttcttaactgcaatttttatattctttatcggtacaatcattgcaggatttagtccgaattttacggttttattatgtgcaagaattgtgcaggcaatgggatcaggtattatgatgccattaatgatgactacaattttagatgttttcgaaccacatgaacgtggtaaatacatggggacctttggtttagttatcggtttagcgcctgccattggtccaacgctttcaggttatttagtggagtattttgattggcgttcactatttcatgtcgttgcgccgattgcagcgctaacatttcttggtgcaataaaatttgtgaaaaatgttggtaccaacaggaaagcgcctattgatatattatctatagccttatcagtcttaggctttggtggtttactttatgggacaagttctttatctcgagatggatggaatgatcctgttgtactgacaacagttattggcggcttaatattagtcgtgttattcattttccgtcaaacaagattagaaaccccgttacttgatttttcagtatttaaaaatagtcaatttgcagtgggaattgttatcatggcctttacgatgattgctatgataggttcggaaacagtattaccaatgtttgtgcaaaatattatgaaagatacagcattacagtctggtttaatattattacctggtgcaattgtgatgggtattatgtcagtggcttcaggtttcctatatgaaaaatatggtgcaaaaatacttgcatttataggtatgctgattgtcgttgtaacaagttcatactttatatttatggatgaaaacacatcatcagctatattagcgacaatttacgctattagaatgattggtatagcacttggtttaatgccacttatgacgcatacaatgaaccaattgtcacgagagatgaatgcgcatggttcatctatgactaatacagttcaacagatatcagcttccatagggacggcaggtttaataacaattatgagtcaagtagcaaaagacttttcacctaatatgagtgattataaaggaatggataaaaaagaaatggcaatgcaaatacaacatgaagcattgttaagtggttatcacgcagcattttggtttgctgtaatcatttctattatcagtttaatcagtgtatttatgcttaaaagtaaacgtaaaataaatcaagagcaacaagaactcgaacaacaacaaagcaaataattattaaaagaccgaaactgtctgcagcgtgtatgctgccgacagtttttatattattatcgagcaagacgaatttagtgttttaaatgataggattatggtatttttaatgttacatcataagatttataggaaaagggtgaaaggctttatagaacattcgatgcgtttatatgaagaaccatttcggttagtaagtaatagtacaaaaactgtagaagttagattgaatgatgagaaaagacaagcagtgcaaataggcgatttcatagaatttactaatttagcaacaggtgaacaagtgaaggtgaaagtgggtaatgttaaagtgtacgattcgttccaagcattactacaacattattcaaataaagaagtaggttttagtgatgagatacaattatctcaaaaattagcatctatctatcaaatatataatcaaactgacgaacttcatttgggtgcattagcaattgaaatacatttagttccataatagagaaatgtattttgtaaaagcataacttagtacatgaaaaaaggtttaggacatcaaaatgaattgcaccccgtcaagtagacaaataaataattaaattatcggttaatctcggtttatacgagattagccatttttaatgtaattctttcattattaaagaatgttatatactcattgataacttgaaacgcttgttctatagtttcaaatttaaagtttttataacccctataaatttcagatttaataattccccaaacaccttccataggtccatt

SEQ ID NO: 41 - DNA, 109669 bp, Staphylococcus saprophyticus
  misc_feature (46850)..(46850): n is a, c, g, or t
ttagtgtttgaatataaggaggattatcatggcagtaccaaaaagaagaacgtctaaaacaagaaaaaataaacgtcgtacgcattttaaaatttcagtacctggtatgactgaatgcccaaattgtggagaatacaaattatctcaccgtgtatgtaagaactgtggttcatacaaaggcgaagacgttgtatcaaaataatttcatttaattattaggctatatgatagcctaatctaatcgttcattaattattcacttgataatttttgaacgattttttattttagagatagttactctatatattcaactgataggttgtgtgaatcatatggaaacaataaatgcacaaataattataaataaaattgaagatcacgatgcgcagtggctttatcatcattttagtgaatcatttcaagaagtttcatcttttgaagaacttgagaaattactaagtaattataatgcacttagaggcgaaaataatttatatagacatctcaatattaatcgacaagatgagtacatttggtttgataataaaatggctacaggtgcaagtgtcacattaaataagtaccaagagattgttggaatgtccttattgccaattggtcataaccataatgcgaaacatactaaatatagctataccattccaattaaagaaccgtgcttagtttattggggtggagataatgaattaacgaatgaccatcatcgatttaaacaacaacgtcatgctttagatttagtgagagttaaagatggttatacatataaaggaaatccaaatgaatgtgagaattactatagctatggaacatcaatcgtagcgcctgcaaatggagtagtagaggcgattgtagatggtataccagataacttacccggtgatagtaatactgtccatccagaaggtaattatattattattaaacatgggcgtaatgaatatagtatgattgcacatattaaaccatattcttttaagattgaaaaaggtgatatgctattgcgaggacaacacatagcagaagttggtaattcaggtaatacaccagagccacatatacactttcaagttatgaaagataagcatattcaagcgacacaaacattaaaaattcaatttcaaaatgttaaagcgcctgtcaaaggtgatatagtaacatataaaggtgatagtattgtggtaaaagaaaaacacgaattgtctaaattagcaaaaggcatacgttcgaacattacacacctattcaaaagttgaaaataaatatataaagaggctatgttatggaaataataacttcagcacaaaataataaaataaaaaatgcaaataaattaaagaaaaaacgtgagcgagataagactggtcttgcacttatagaaggctatcatcttatagaagaagcttataaaagtaaaatcaagattcaacaactctatgttgttgatgcggatagaatacatgatgatatgataagttatgcagaagaagtatttgaaattaatttaaaagttgcagaagtattatcgggaactgtgacaccgcaaggattctttgctgttattgagaaacctatctacgaaagtaataatgcgaagcaagtgttattaatagattgtattcaggatccaggtaacttaggtacgttaatccgtacagctgatgctgcaggtttagatttaatcgtgttagaaaaaggaactgcagatccgtatcaagataaagtaatgcgtgcaagtcaaggtagtgtatttcacatacctattttaacgacagagttaagtggttttattgctgattttgagggcgatgtttatgggactgcgttagaagatgcagttgtatataatcaaatacctagtcaagagacatttgctttacttttaggtaatgaaggtgaaggcgttaatgacaaattactcagtcaaacaacgcaaaatctaacaattccaatttatggtaaagcagaaagtttaaatgttgcaatagcaggtagtattgtgatgtatcatttgaaaggttgaccctatcataaatcatcgtatataataaatgtaatgatatttaaatatgaacccataaaaagacgtaaactaagtagatacagaagtaaaagggagattatccacgactgaaagataatccgatgtagttagtttttttcacctttttggttacttaaagaaatttaagtcggaaatcatttccgttatcaatgacaacaagtgtatgctacggcataaatttgggtggtaccacggaagacttcgtcccagttttaagggatggaagtctttttttatgcaattttaaaatataaatataacaacttaaaattcaagtaggagggctaagtatggcacaaacagaagctatggctgaaatcaagcagcaggcattagtcgatattaatgaagctcaaaatgaaaaagcgttacaggatgtaaaggttaagtatttaggaaaaaaaggttcagttactggattgatgaaacatatgaaagatttaccgaatgaagagaaacctgcatatggtcaacaagtaaatgaagttagacaaacgattgaaaaggaaattcaagcacgtcatgaattactgggtaatgagcagttagagcaacaattgaaagaagaaaaaatagatgtaacattaccaagtcgtaaaattgcgattggtgctaaacatccgctcacaagaaccatcgaagaaattgaagatttatttttaggtttaggttatgaaattgttgatggttttgaagttgaacaagattattataactttgaagcgttaaacttaccaaaatcacatcctgccagagatatgcaagatagtttttatataacggatgaaattttaatgcgtacacacacatctccagtacaggctagaacaatggaaaaacgcaatggtgaaggcccagttaaaattttgtgtcctggtaaggtttatcgtcgtgattctgatgatgcgacacatagtcaccaattcactcaaattgaagggttagttgttgatgaaaatattaaaatgagcgatttgaaaggtactttagaattattagctaaacaactatttggtgaagatagagaaatacgtttacgacctagctatttcccatttacagaaccttctgttgaagttgatgtatcttgtttcaaatgtaaaggtgaaggttgtaacgtatgtaagcatacgggttggatagaaatattaggtgctggtatggttcatcctaacgttcttgaaatggcaggctttgattcaaataaatatactggtttcgcttttggtatgggaccagatcgaatcgctatgttgaaatatggtattgaagatatacgtcatttctatacaaatgatgtacgtttcttaagtcaatttaaagcagtagaagacagaggtgaaaaataatgtttatttctaaagaatggttagagtcatatgtagaaattaatgaacaagttaatgtacttgcagaacgtattacacgtactggaattgaagttgacgatattattgattatacaaaagagattaaaaaccttgtagtaggctatgtacaatccatagctgcacatccagatgccgataaacttaatatatgccaagttgatattggtgaagcggagccagtacaaatcgtttgtggtgcgccgaatgtagatgcaggccaaacagtgatcgttgcaagtgttggtggcagattacctggtggtgtgaaaatcaaacgtgcgaaattacgtggagaacattctgaaggtatgatttgttcattacaagaagttggggtgcctagtaatttagtaccgaaacaatttgaagatggtatatttgtattttcaactgaagttaaaccgggaacagatgcattagatgcattatatttaaatgatcaagtgatggaatttgatttaacaccaaatagagcagatgcattaagtatgattggtacagcctatgagactgctgcactatataatgttccaatgacgaaacctgaaacacaaagtacagaaacaagtaatcaaacaaatgatgaaattagtgtcaacattcaaaatgaagataaagtaccatattacagtgcacgcgtagtgaaaaatgtaacaattgcaccttctccagagtggatgcaaatgcgtttaatcaaagctggtattcgcccaattaataatgttgtagatatctctaattatgtattaattgaatacggtcaaccgttgcacatgtttgatcaagaccaaattggttccaaacatatagaagtgagacaagctaaagctgatgaagagatgacaactttagacaaccaggaacgtcaactaaaagaaaatgacattgttataacaaatggagaaacacctattgcgattgcaggtgtaatgggcggagatttctctgaagttacagaagcaacgaagcacgttgtaatagaaggcgctatttttgatccagtatccataagacatacatcacgtcgattgaacttaagaagtgaagcatctagtcgcttcgaaaaaggtattgcaactgaatttgtagatgaggccgttgatagagcttgttacttattacaaacctatgctggcggttcagtagcacaaggacgtgtttctcaaggtgaacttggatctttcgttacaccaattgatatttcagtttcaaaagtgaatcaaacaatcggttttgaactcagtgctgaagatattgaatctatatttgttcaattaggttttgaaacaactaaaaataaagatgtactcactgtcatggtgccttcacgtcgtaaagatatttcaattaaggaagatttaattgaagaaatcgcacgtatctatggttatgatgaaatcccttcaacattacctgtatttgatcaagtaacacatggcgcgttaacagatagacaatctaaatcaagaataattaaagcgacattagaaggtgctggattaaaccaagcaattaattattcacttgtagataaagacagagcaaaagattttgcattacaagaacgtgaaacaattgacttactcatgcctatgagtgaagctcactcaactttacgtcaaagtttaatcccgcatttaattgatgcagttgcttataatgtggcacgtaaaaatagcaatgtgcgattatatgaattaggtagcgtattttttgcgaatggtgaggatgaacttcctgatgaagtagaatatttaagcggtattttaacaggtgattatacagttaatcactggcaaagtaaaaaagaaacgattgatttcttcgttgctaaaggtatcgttgatagaatcgctgaaaagctagatatccaatttgaatatgaagctggagaaataaatggactgcatccaggtagaacagcttatgtggaattaaatggcgaaattgttggtttcgtaggtgaactacatcctaaaactgaaaaggactatgacctaaaacgcacgtatgtctttgaattaaactttgataaattaatgtcagtatccgttggttatattaattatcaagcaattccaagattcccaggcgtatcaagagatatcgcattagtggttaatcgtgcaacaccatcagccaaattagtaaacatcattcatgaacatggtggcaatattttacaagaagcagaagttttcgatgtctatgaaggtgaacatatggcagaagatgaaaaatcaatcgcaatccgtttagcttatttagacactgaacaaacattaacggatgataaagtgaacgctgtacatgaagccatattagaggctttaaaatcagagggtgcaacgattagataatgattcacaaacatatattttagatttgattttgtaatataagataagcgagtaggatagaaatcaaattttctaatagaaatttcgaagtctcacctatgcaatcaaggcaaggatgactcggataaaggtttatttgagctaaagcgcatgcataagtctaactagactttttacgtggcatactgatgcttttgcataagaagtgagacattacaatttcaatttcaattcagtcatctactccccaattgaaaaagcgtcttagacatctatttatgtctaaggcgcttttctatttaatcattatattttttttgaactaaattttcagcttttttacgattggcaaaatgtttcttggaaatagaatcaaggtaagctatgcctttgcgttcaattattttagctgcagttaaatctactttattactcgctcctttaggaatgtcgattttaactgattgagttaaacgatccatatgtttaacgaatgcataccttgaaataatacttgcagctgcaattgcaatggattttgattcacctttagtctcaaatttcgttttattactgaatggtaagtcacttaaggcataacgtttataaacacctgcttcggcaaattggtcaataacgatataatctaattcagtggtatcaattttttgagtgacatttttgatcgcttcattatgcaatacagccttcatcttaacttgagaccaacctgccttttgcttttcattatatttctcattattcatgaccaataatgagtgggggataaaggtaacgagctgttcggctagttcaacaatttttgtatctgttaatttcttcgaatcatcgactcctagcgctttcaagatttgtacatttttatgtgagacataggcagcacatacggtcaatggtccgaaataatcgccacttcctgcctcatcactaccaatacattgaaattggttatatgaaatcgtttgtttggttgttgaagctttcttactggatggttgtgatttagtaacattaggcaacaactgtgcagcgatacgttctgcatccttgccttgaaacatcactttgtttgaattatatattgaaatagaagttcccttgtattttgtttttgctttcataccttgggatagctgtgatgtttcaaagggtatttttgacattaattgctgtatatctgaattggttaatttatgtacaatatttgtcatgtacggtacctcactttttatatgaataacttatgtatttagacattgaacatcatatcatatgtatgtaagtggtgttaggagataaatatatgatattttaattattgaaagaaaattttaattgttatcgataaaaaatagcattaataacaaatatttcttatataacaattctcatctcttacaaaataatattatgtcgtgtataatggttcgtgaatattctaaaatactaaattacatacttaattgaaacagataggaaaataagttcggaaatatattaaaaagtcaggagttatgatatgggcgagtttaaaaatcggattaacgtaactataaatgatcaacattatactattgtcggtgaggacaatcccgagcatatccgttacgttgcgcatttagtagacgaaagactcaaaatgttagctagtaaaagtgctggattagatacgacgagaaaggcgatacttacagctgtcaatattatgcatgaaaaagttcaattagaagaagaaaaccttcgtctgcaacaagaaataaaacaattgaaaaatagtgaagacaaatgattttagatttgattgttctaattatttttctttatattggaatgattggttttagaagaggtgcttggttaagtgctttgcatttgacttctactttgttttcgttatggattgcacaaagattttatcatcaaattgctcagcgattagaattatttataccatttcccaagacacgtgcatttgatttgaattatgccattcaatttgataatatacaccaacgatttgatcatatcatcgcatttttaattattgcgatccttactaaaatcatatgttatggtattatagtgatttttgataatgtgttaaaatttaagcgtcctaatggcataagtcgagtgattggtgtgataatgagtctgatttcttcaatcattatcagtactacattgctttacactatttcgttgtatccattagaaatagtgcaacaacagcttataagtggggaaatcttagaatttttaatattacataccccctatatatccaactatgttgtgaatatatagcgtgttatagattagaatggtcttataaaatataggaggtcaggacacaattaatttactgaatgcgtgctacagtaatctgtcttgacctttttttatggagtgaaaataatgacaaaaaaagatattattcaattactagaaaaaatagcgacttatatggaattaaaaggtgaaaatacgtttaaagtatctgcatatagaaaagctgcacaaagtcttgaaatggacgaacgtacgttagatgaaattgaaaatgtgactgaattaaaagggattggtaaaggtgtaggagaagtgattgatgaatatcgtcagtcaggccaatcaagtgcattagaagcattgcaaaaagaagttcctgagggacttattcctttattaaaaatacaaggtcttggaagtaaaaaaattgcaaagctatataaagaattaaatattgatagtaaagaagcactgcaagttgcttgtgaacaaggaaaagttagtgagttaagtggctttgctaaaaagacagaacagaatatccttgaagctgtaaaagctttaggcgctaagaaagaaaaatatccaatcgatcaaatacgtggtttaaatagtgaaattaatgactatttagctacagtcaaggatatagacaaatacgaagtcgctggtagttatagaagatataaagaaatgagtaaagatttagattatattattagcacagatcatcctacttcagttcaacagtcattattaaaaatgcctaacattgttaagcaagtagcagtaggtcaaactaaggtatcacttgaattagcttatgatgatgaaacgataggtgttgattttaggttaattgaacctgcagctttctatcatacgttacaacattttacaggttcaaaagatcataatattagaatacgacaattggctaaagaacaagacgaaaaggtaagcgaatatggtattgaacaaaataatggggaaatcattcaatatcaaagcgaaaaagaaatatatgaacattttggagtgaattggatagaacctgcattgagagaggacggaagtgaatttgataaaaacttagataatattatcaaactaacagatattcatggtgatatccatatgcatacgacatatagcgatggtgcatttagtattgaagatatggtaaaagcgaacattgagaaaggttatgaatttatggtgattactgaccattctcaaagtttgaaagttgcgaacggcttatcagtcgaacgtttattgcgtcaaaatgaagaaattaaagcactaaatgaaaaatataaggaaattgatatatactcaggtatagaaatggatatcttacctgatggtcaattagactatgatgatgagatattagcgaagttagattatgtcattgctgcgatacaccaaagttttaatcagtcgcaagaagaaatcatgcgcagattggaaaatgcttgccgtaacccttatgtacgccatattgcacatccaacaggtcgcattataggtaaacgtcctggctatgaaccagacatagataaattatgtcaacttgtagaagaaactaataccattttagaaattaatgcaaatccaaaacgtttagatttaaatgcagatacagttaaaaaacatccaaatatacagctaactatcaatactgacgcacatcatgtcgaacatttagaatttatgaaatatggtgttgcaacggcacaaaaaggatttgttacaaaagatagagtgattaatacaatgtctcgagaagaatttaaatcattcgttgagaataatattaaactgaagaaatagagggattagatgagacagaaatctttaaatgtcttagaattcgataaaataaaagcattgatagaaaatgaaacaatcagtgatttaggtaaagaaaaagttgtagatatggcaccggcaactgattttaacacggttgaatttcaaatgaacgaaacagatgagatttcacaaatttataacaaacatcgtatgcctagtttaagtggattagctaaaatatccacgtatattcatagagcgaaaatcggtggtgtactcagtgttagcgaattaaatgtcattaaacgcctaatacaaatccaaaatcaatataaaacattttataataatttattaaatgaagaagaaactattaattaccctattcttaacgatagaatggagcaactccctgtattgtcagatttatatcaaagtattcatcaaaaatgtgatacttatgatttatatgataatgcaagttatgaattacaaggaattagaagtaaaatttctagtacgaatcaaagaattaaacaaaatttagacaagattgttaagagtcaagctaaccagaagaaactatctgacgcgattgtcactgtacgtaatgagcgaaatgtaattccagtgaaagcagagtatcgccaagattttaatggtattgttcatgatcagtctgcttctggacaaaccttatatattgagccctcatccattgtagagatgagtaaccaaataagccgtttaaaaaatgatgaagcgattgaaagagaacgcatcttatccgcattgacagtagaagtagctgaagaagcagatgcatgtttaatttcagagtcaatcatgggccaaattgatttcttaacagccaaagcacgctatgcaagttcaattaaaggaaccaaaccacaatttacaaaagatagaacagtttatttaccaaaagcttttcatccattacttgataagcaaacagttgttgcgaatacaattgaatttgcacaagatattgaaacagttattattacaggtccaaacaccggcggtaaaacagttacattgaaaacattaggcttaatcattgttatggcacaatcaggtatacttatcccgacattagatggtagccaattaagtatttttgaaaatgtatactgtgatattggtgatgaacaatctattgagcaatcactttctactttctcttcacatatgaagaatattgttgaaattttacaagatacaactaaaaacagtttgatattatttgacgagttaggtgctggaactgacccgagtgaaggtgctgcactagcaatgagtattttagatcatgttcatgaaataggctcattagttatggcaacaacgcattacccagagttaaaagcatatagctataaccgagaaggtgtaatgaatgccagtgtcgaatttgacgtcaatacattaagtccaacctacaaattattaatgggtgtaccaggacgttcaaatgcatttgatatttctaaaaaacttgggttaaatatgaaagtcattcaaaaagcaaaatcaatgattggccaagatgagcaagaaattaatgaaatgattgcttcattagaatctaattcaaaacgcgtagatgaacaacgtatcgagttagattatttattaagagaagcacaagatacacatgatgctttagctaaacaatacgaacaatatcaaaatcatgaaaaacaattgatgaatgaagcaaaagaaaaagcgaaccaacgtgtgaaatcagctacaaaagaagctgacgatatattaaaagaactgcgtgaattgagagaccaaaaaggtgccgatgtaaaagaacacgagctcattgataagaagaaacaacttgatgatcaatacgaagccaaatccctaaaacaaaatgttcaaaagaaaaaatgggatgaaatcaatgcaggtgatgaagttaaagtgctaacttatggccaaaaaggcgaagttttagaattgattgataataatgaagcggttgttcaaatgggtattattaagatgaaattaccattagaagacttagaaaaaacgaagaaaacgaaatcggaaccaacgaaaatgattaaacgagaaaatcgtcaaagcattaaaatggaactcgatttacgtggctatcgttatgatgaagcaatggttgctgtagatcaatatttagatcaagctgtattgagcaattatgagcaagtttacattattcatggtaaaggtacaggtgcattacaaaaaggtgtgcaaaatcatttaaaacgacataaaagtgtggcatcatatagaaacggtatgccaagtgaaggtggatttggcgttaccgttgtagaaataaaataattgtgagcaagaggtatgcagatttgtataaagtctgttataatttcttcatcatttgaaatttaaggaggattggcagttatggcaatcgtaaaagtaacagattcaaactttgatgataatattcaatcaggggtcaatttagtagatttttgggcaacttggtgtggtccatgtaagatgattgctccagtattagaagaattagctggtgactatgatggcaaagctaatattttaaaattagatgtagatgaaaatccatcaacagctgctaaatttgaagttatgagtatcccaactttaatcgtttttaaagatggcgaaccagttgacaaagttgttggtttccaaccaaaagaaaacttagctgaagtaatcgaaaaacacttataataaattgagcaactttctgggacattaatcttgattaatgtcccagttttcaatttataagcatatcaatcaattgagaaacattgcgaagctattttataatataaataaatgtaaattaaaactatgttgatatcatataaaaccaagctatttattgaaaaatcgaactataaaattttgtgtgaaaggaggaggacaatttatggaaacataccaagaaaaaattaagcagaaactgacagtagtaccaatagagcccggttgttacctaatgaaagatcgaaatgatcaaattatatatgtaggtaaagcaaagaaacttagaaatagattaagatcttattttactggtgcgcatgatgcgaaaaccacaagacttgtcggtgaaattcgaaactttgaatttatcgtaacatccagtgaaactgaatcgctactattagaattaaatcttataaaacaataccaaccgcgttataacatcttattgaaagatgataaaagttacccttttataaaaataacgaaagaaaaatatccaaggctcattgtaacgcgaacagtgaaaaagggaagtgggaaatactttggaccatatcccaatgcatattcagcacaagaaacaaaaaaattactagatcgtatctatccgtttagaaaatgtgataaaatgcctgacaaattatgcctttattatcatattggccaatgtttagggccttgtgtgtatccagtagatttagaaaagtatgctgaaatgacaaaagaaataacggattttttaaatggagaagacaaaacgattttgcataatttagagcaaaaaatgcaagagtcaagtgaatcactagattttgaacgtgccaaagaatatagagacttaatacaacatatccataaccttaataaaaaacaaaaaatcacatcttctgataatacgattagagatgtgtttggttacagtatttctaaagggtggatgtgtattcaagtattctttattagacaaggtaatatgattaaacgagacgcaacgatgataccgctccaacaaacggaagaagaagagttctatacatttattggacaattttatgatttaaatcaacatattttgcctaaagaggtacatgtaccgaaacatttgaataaagagttgatacaatccgttgtggacacaaaaattgtacaaccacttaaaggcaaaaagaaagatatggttgatttagcaaatcataatgcagaagttacgttagaaaataaatttgaactcattgcaaaggatgaatcacgcactgttaaagcgattgaagagttaggcgatgtaatgggtatacaaacgcctataagaatagaggcttttgataactctaatatccaaggtgtaaatcctgtgtctgcaatggtgtctttcattgatggtaaaccaaacaaaaaaggttatagaaaatataaaattaaaacagttgatggacccgacgattataaatcaatgcgtgaagtggtacgcaggcgatatacacgtgtattaaatgagggcagtccattaccagatttaattattgtagatggtggtaaaggccacatgagtggcgtcattgatgttctagaaaatgaattaggtttagatattcccgttgccggattgcgtaaaaatgataagcaccaaacgtcagaaattttatatggagagcaagcagaggttgtacctatgaaaaaaaatagccaaccattttatttgttgcaaagaattcaagacgaggtgcatagatttgcaatcactttccatagacaaacaagacaaaagacaggattacaatctgttctagatacagttgatggaattggtgccaaacgtaagactaaattattacgtacatttgggtcaattaagagaatgaaagaagcaagtgtagaagatttaaaaaactctggtcttcctcaaaatgtggctgagaatcttcatcacgccttatccaataattcatagatataactttgtggcatgagaatcattctcatgcccaatttctatttaattagtgttacaataacaaataacaggagttctttttttacaagtatatggaagcgttttctaattgagaatgttctcaacaaccttttatttaaactgtaaactacaacgtctcaaaaatgcagtgatgtttaaataattatgcaatgttattgtgttgtaaaaaacatacgtcacaaaaaaatcattgttcataaggtttatatgaaaattgccattactttgtacggtaaaaaaagaaatctaaaaaattatctgtttcacaggggggacttccttttggcatattcgaaaaatcaattctatttaagacgcttacattctttgctaggcgtaataccaataggtggattcttattagttcatttacttgttaaccatcaggcaacacaaggtgaggccgcgtttaacaaggcagctggatttatggaatctataccttttttaattgcagtggaatttatcgttatttatattccaattctgtatcatgcggtttacggcgtacatattgcctttacggcaaaggagaatgtagggcattattctgcatttagaaactggatgtttttactacaacgtgtgactggtgtcataacatttatctttgtagcaattcatctatggcaaacacgtatccaacgtgcgttaggacatgaagtgaactttgacatggttcatgacattgtgacgaatccattttggttaattttttacattgtatgtttattagcagtaacattccactttgcgaatggtttatggtcattcttagttacttggggtgttttacaatctaaaaaatctcaacaaatattcacttgggtttcacttgttgtattcctagttgtttcttatatcggaatcagtgcaatcttagcatttttataaagaattaaaactaagtttcatatatatttgagggagtgacatatatggcagagaagaaaattattgttgtcggtggaggacttgccggtctgatgtcaacaattaaagcagcagaacaaggcgcacacgttgacttgttctcacttgttcctgttaaacgatcacactctgtttgtgcacaaggtggtataaacggagcggtaaatacaaaaggtgaaggggactcaccatcagtacatttagatgacactgtatatggtggagactttttggcaaatcaaccgccagttcaagcaatgacggacgctgcaccaaagattatccatttactagaccgtatgggtgttatgtttaatagaactaaagaaggtttattagactttagacgttttggtggaacgatgtaccacagaacagcgtatgctggtgcgacaactggccaacaattactttatgctttggacgaacaagttcgtagctttgaagtcgatggtttagttacaaagtatgaaggttgggagttcttaggtatcgttaaagatgacgataatatggcgagaggtattgttgctcaaaatatgacaacatcagagattgaatcatttggttcagatgcagtcattatggcaacaggtggtcctggtattatcttcggtaaaacgactaactcaatgattaatacaggttcagcagcttctatcgtatatcaacaaggcgcaatgtatgcaaacggtgaatttattcaaattcatccgaccgcaattcctggagatgacaaacttagattaatgagtgagtcagcacgtggtgaaggtggtcgtatttggacatataaagatggtaagccatggtacttcttagaagaaaaatacccagattacggtaacttagtacctcgtgatattgcaacgcgagaaatctttgatgtatgtgttaaccaaaaattaggtatcaatggtgaaaacatggtatatctagacttatcacataaagatccacatgagttagatattaaacttggtggtattattgaaatttatgaaaaattcactggtgatgaccctcgtaaagttccgatgaagatcttcccagcagttcactattcaatgggtggtctatacgttgactacgatcaaatgacaaatattaaaggtttatttgcagctggtgagtgtgattattcacaacatggtggtaaccgtctaggtgcaaactcattattatcagcgatatatggtggaacagttgcaggaccaaatgcgattgaatacatctcaaatatcgaagattcatatacagatttagatcaaagtttttatgaaaaacgtgtacaagaagaacaagaaaaatttgatcacttactgaatatgaaaggcactgaaaatgcgtataaacttcacagagaacttggtgaaattatgacagcgaatgtcacagttgttcgtgaaaataaagcgttattagaaacagatagaaaaattgtagaattgatggaacgctatcaaaatatagatatcgaagatacgcaaacttggagtaaccaagcggtattctttacacgtcaattatggaatatgttagtgcttgcaagagtgattacaatcggtgcatacaacagaaatgagtctcgtggtgcgcattataaaccagaattcccagatagaaatgatgaagaatggttaaaaacaacactagctacttatcaaggtaaaacagaggcgcctaagtttacttatgagcctgtagatattagcttgataccaccacgtaaacgtgactattctagtgtgtcaaaaggaggtaaataattatggcagatactcaagaagtacatgatgctcctgaacaaaacgaacaaaatcaacaacctagccaaaaaacaattaaattaattattaaacgtcaagatacggatcaatcaacaccttatatggaagaatttgaaattccatatagagaaaatcttaacgtgattgcatgtttaatggaaattagacgtaatccagttaatagtaaaggtgagaaaacaacacctgtcatttgggatatgaactgtttagaagaagtatgtggtgcatgttctatggttatcaatggtcaagcaagacagtcttgttctgcgattgttgaccaattggaacaaccaattaaattagagccaatgagcacgttcccagtcattcgtgatttacaagttgatcgtactagaatgtttgataacttgaaacgtatgaaagcttgggtaccaattgacggtacgtatgatttgggaccaggccctcgtatgccagagaaaaaacgacaaacagcatatgaattatctaaatgtatgacatgtggtgtttgtttggaagtttgccctaacgttactaagaaaaatgactttgttggtgcgcaagcaatttctcaagttagattgtttaacttgcatccaacaggatcaatgactaaagatgaacgacttgaagcactaatgggtggtggcggtttacaagcatgtggtaattcacaaaactgtgtaaatgcttgtcctaaaggtattcctttaacaacttctatcgctgctttaaatagagaaacatcattccatatgttcaaatcattctttggttcagatcaccaagtacaataaaagctcaaattaaataaataggacttagcatttgtttagtacaaatgctaggtctttttttataaaataaagtacgataagttatatattttgtttagtaaaggatacatactaaaaattattaataaatgacagtgttgttaaatgataataaaaacaggtctatgctacaataaagtagaagacgataagtaaggatgtaattgaatatggaaaaaccaattggtgtaattgattcaggtgttggcggtctaacagtcgcaaaggaaattatgcgtcaactaccaaatgaaacaatatattatttaggcgacattgaacgttgtccatacggatctagagaaggatctgaagtaagacaatttactactgaattagcacaaaagttaatgacctttgacataaaaatgctagtcattgcttgcaatactgcaacagccgttgcactcaaccatttacaaaatattttaccgattccagtgataggtgtcattgaaccgggcgcacgtacagcgattatgacaacaaaaaataatgatgttttaattttaggaacagaaggtacaattaaatcagaagcatatagacatcatattaaggcaattaacccgaacgttgaagtgacaggtatagcatgtccaagtttcgcacctatggtagaacaaatgcgttataaagacccaaccattactagtattattattcatcaaaatttaaaacactggcgaaatagcaatgcagatacagttattctgggttgcacacactatccattgctttaccaacctattaatgattattttggtggagagaaaacagtgatttcttctgggctagaaactgctcgtgaagtcagtgctttactaacatttagtaatgaacatgctggttatcaacgtcaacctaaacatcgttttttcgtgactggtgaaacggaatatatagaacgaatcataacagaatggttaaatataagtgctaccgttgaaaaaatagacttaaaagaacaggaggcataacaatggaagatattgtaattgcatcgacgaacaaaggtaaaattaacgattttaaagttatatttccagattttaatgttataggtatagctgaaattatagaagatttcgatgttgaagaaacgggagatacatttgaagcaaatgctaaattgaaatcagaagctgctgcaaaagcattgaataaacgtgtgattgctgacgatagtggacttgaagtatttgctttagatggagaaccaggcgtttattctgcgcgttatgctggtactgataaagacgacgatgccaatatcgataaattattaacccagcttggtgatgaaacagacagaagcgcacagtttgtatgtgtgattagtatgagtacgccaggcgaggaaactgtacaatttaaaggtaccgtacaaggtgagattacattgagtaaaataggtgaacatggctttggctatgacccgattttttacttagatgataaaaacaaaacgatggcacagctttctgcagaagaaaaaagtgaagtcagtcatagaggtaaagcaatagaaaaattacgacaatatttagaaggtgatgaatcatgacaaaatggattatagttagtgataatcacacagagcaaggtgtgctttttgatgttattaatcaccatgatcatattgatgttgcaattcatttaggcgattcagaatttgcatatgatgatagtgaactaagtcgtttttatagagttaaaggaaatacagatttttatcctgaatttcctaatgaagagactatagaaatagacggtattaaagccttttatacgcatggtcatctttataatgtgaatcgttcacgcatgcaacttgcagaacaggctaaatcgttaggctgtcaatttgctttttacggtcatacacacgtggctaaacatgaaaatatcgctggcgtacatgtaattaatccaggaagtatatcacaatcgagaagtaatattgaagaaacgtatgcagaattagttattgatgaacaaagtaaggaagtagtactgaatttttataatcgtgatcataaggtcattgatagtgaaacttttgaaatctaatcgttaaatacatacgatggttatgttaatacgaaaatttgctttcaatatgcagaagtaagaaatcaaatatacacgtatttgatttcttatagtgctgctttatgataatcattgatcagtaaaagcaaatgagataacttagtttttaattagaattttaaaatatatttagaaaagatgataaaaagtccattaaagtgaaaaatcatatttatttttagcgcttagagtattgctttatagcactaagttagatataattatttttgtgttcaaaaacaatatgtcctggtagctcagctggatagagcaatggccttctaagccatcggtcgggggttcgaatccctcccaggacactaatagcgttgaatagcgcacattccaaacttagaaaccccgttgttacggggtttcttttattttgtctacaatgcgatacaatagaaaacaaaattttatggcactggcatggcaccgagaacatatttttacattgctgataaaatttcaattgctttgttattttcttcaagatatttttcttccaataaatgggaatagatttcagtggtaacagaaatatttttatggccaagcctttttgaaatataataaatcgatacatcatttgcgaggagataagagcaatgcgtatgtcttaatgcatgtgaagtaatctgtttgataccatgtaacttacaggtctgttttagttgcttgttaacagcgttaatagtaagtgtagtactaaaagaattaaatagtaatcctttggtatttagtttgagtttttcaatcatactagtaatgtgtctcatatcatctttagctattgttaaagtacgaggtgatacatcatttttacgttcatctataaataattcattttttacttggttaatgtattcatacttcatatttaaaacaccacttattcgacagcctgtacaaatcattataaatagggcgagggatgaacgattattttgtgatttgaaatattgtttaagtgtttcatattctactaggttaataaacttactttgttcatcttttggagggttagaccctttaaatgtgaccttataagtaatatttttaggtagtaatccttcataaacagcatcatctaaagatgatctgatatatccatttagttttcttattgtttccttcgaatgtgttttagaaaattcatttataaattgttgatacatatttcgtgttaatgatttaaggcttgtctgtgaaaatgaatgattaccaatatgtttgatagctgccttatatgatttgtaagttataggtgtaacattaggttgtttgaatgtttcgcaccaattcttaaagtaatcataaaaggataaatcattatcaagataaagccctttagttaattcattaaacttttcatttcctgcatattcagcttcacgtttagttttaaatcctttttttctatggcgtttgccttcatatacaaagtcatacatccacttttttagttttttatcatattgttgtgttttcataagttgttcctcctaaaaaagataaaaatataaagggcagtagagactgccccttatcacattaattataactaatgtggtatagtgatagccaaactcaaaaaaagcggttcaaagttagacctatgatgattataggttctgaaaaagatacttttcaaacagatttcactgcctttcctatttcttctgtatctaacaaggctaatttgaatccagattttgatataaatatagggtgtaacttttgtcctaatttaaagcacataacttattctgattgttatgtgcgggtacataaacctactacttataaattcgaatgatattttaagagaaaaagaaaatgatgatatttgcaaaatttatccagataagtacaaagagataaatgatgcttggattaattttaataaaactctattttaaaacactcaccaactggtgggtgtttttatttatatgatcgttgggtaatataacattgtagtagttccacaccttccattgaaagttatatattaagtgcagccattaatttggttgcttttttatgtttgtttatttatgtagtggggaataaagttagggacattatttcaaaaggagagggtaatatgggctttatacttatgataatcgttggaggattaataggatggcttgcaggagctattctaggtaaagatattccaggtggaattattggtaatatcattgccggcttaattggttctgcaattggaagtaaactgttgggcacatggggaccagttttaggcggagtgcctattctaccagctttagttggtgctatcattttaatatttatagtttcatttattatgaaagcaattagaaagtaaccatagagaaaaataaccaccctgataattttgggaggttatttttttatttacatatgcgaacaagtgttctattatattcatgaggtgattatatgaaacctaatttagattggagtaaaaattttcaagaatttcaagaaatattaaattctggaattaatccagagtggttatataatgctaaagcgaatatggttttaaacccagcttatactggtgaaggcaagcaatttttctttactaaggacattatagaagctagtaaaactattccatttttttgaggtgataatatgaaaataataaatcctaacgcaccagatgaatataaatacgaaactgattatcgtaatataccgagagaatatcttaattcacatataccagaaagtagaggcatcgttaagtggcaagccttcaagacactccccgaacaatacgagcaactagaacaatacatacaagatcaaaataagattgatagaccgatattagacgacgatcaattgaatgaccttaataacacattaattttcaaaatgtataatgacccatcaattgaattgcgttacttcgaaactggttatattaaaacaaaagtaggttatattcataaagtagacgtgcatactaaaacactacacatgtatgaagatactggaatgagtgtgttgaatttaaaagatattgtggagataaaataagggagctattatggaaacacatcagtccgcccgagcatatcgttgagtagttattattgttattaaagttgacatagatttttttaattactcttattattgtatattaaaattagctagtgaaaaactagcgcaattcaccttttgtaaaatgatatatttttaacagtctgcccccacaggctgttatttttatgtaaatttacttaacataaattttttcacaaaaaataaataatatataatgattttagctagcggaaactagctatcttaaccttccactatttaaataaaaacgagcgtgataattatgagtgaatacaaacaggtaatcaaaaaactaattgaaagcgagataactggttatcaaatatataagaacacacttataaatcaagctataatttctactttaagaaacgggaaacgtgatttagacaatctatcattaaagaatgcagaaaaactataccaatatggaaaagcccacctaagtgaataggtgggtattttttagggcaaaaaaagatagattatttaaaaaagtgcagacgctcatagaaatataacattttaaaagtcttttaaaacagtaattccacaagtccttttaaacatcaatatacaatcgtaaaagtaataacaagaatctgtcaaggtgtttaaaattgcacaataatagatttagtaacgttaaagataacgaactagtttctaccattaaaatgtaagaaatatataatcaatatttttatggcactggcatggcactaaaacgctacaaacactgataataagggctgtatagcagccctcccaggacactaaaagaataaattacatattattcaattaagaatcttgcgcttgcaaggttctttttttatagaattaatgtaagcgggatagtaagcgaaatggaaagatttgaagaaagcagattaaggtgagtaagttggatagatggtggctaatctcagtataaagtgaggtgatgcttatgaaagtaccgacaaaatctttagaaaggagacgccttgtttggtttcaattgtagaagtgccgtacttaatgttaggtttcggtacattcatcgttaccttgttaggtatagcaatcacaattgttaaatcaagccataaaaaataaccatcccaacttttgatacactcccctaaaagtagacactttaaatataaaaagtgaactataattaggggagtgtattttttatgactacaaataaagatgcctttagaaaagcgtattaaaatagttgaagatatagttgatggaaatatatctagatatagtacagcaaaaaataatggagtttctagcgctacattacaagaatgggtaagaagatataaagcttatggtgtagatggattaaaaccttttagtaaaagaaataaatactctgcagagattaaagcaatagctatagaagatgtgttagaaaggaatattccactgtataaagttgttaacaagtataatattagctctatatcagttttaaaattgtggttaagaaattataaaaagggaaaatctaacaagcacacagggaaagggttttccactatgaataaatcaagaaaaacaactttatctgaacgtattgaaattactgaaaatgtcatagctaaaaattataactatcaagaggcttccgtggaatatggtgtttcctaccatcaaatataccattgggtgaagagctataaaaagaatggtatagatggattaaaagataaacgtggaaaaaataaaaaacaagaattatctgaaatagaactaataaaattagaaaataaaaaactaaaaacaagaatagaatacttagaaatggataaagcaatcgtaaaaaagtggcaagagttcaagtatcgaaacaatcattttcattaggtcataaagaacatttatatcaaatgatatttgagctcaacagagaacaaaattacagtattaaaatgttatgcgagcgtctagaagtcagccgtagtggttattataaatggtgtaataaagaaatttctaataatgaaaaacgctctaaattaattgcaaaagaaattaagtgtatatttaagaactctaaagaaaccttcggtgtagtaaggatacattacgctttaaaaagagagtgcaatttaaatgttaatataaaatgtattagaagaattatgcgaattttaggtttacaagcacaaatcagaaaaaaacgtcctaattggactagaatcaaaccacatttcacagctgaaaatatattgaatagaaattttgaagccaataaaccaaatcaaaaatggtttacagatattagttacttaaattatggaaaaggtcaaaaagcttatattagcgctataattgataggtatgatttaagtataattgcttataaagtgagtaagcgtaatgatttaaaattggttatggacatattgaaattagccttacaaaataatgatgcatctaatacagttttacatagtgacagaggttttcaatacacttctaaacattacaagaactatttagatacacataacgtaaaaattagtatgtcaaaagtaggaagttgtttagataatcaaccgatagaagctttttggggtacgttaaaatcagaatattactatagaaatcaattcagcacatatgaagatcttgaaacaggcatcagtgaatatattaattattatatgaataaaagatatgttccaaaatttgatggactaacaccaaatgaatataggaacgtatcttaagaaagaataattacagactaactaataaaattaattaggacaaacgaaattctaattaacattataaaaaggattgaataacatattatcaaatggtaatatgttatttatattagttttaggtaatatgaggtgattaaatgcatgatattgagttaaaagcacattttatacatggtctttctaataaagtacgtttgatgatattagagctacttaaatcgaaagaaatgactgtcaatgagattgttaaacaatctcaaataagtcaatctagtatttctcaacatttatcttgtctcaaagggtgtggtttggttaattctagacaagaaggtaaatacgtttattaccaaataaaaaacaatcaaattttagaactgcttaaacttattgattctgtagttgaaaatactgaagatgatattcaaagttgccagtatcatactatataacgaaagaagatgacttaaatgagtactaattgctgtaataataaagctgaatctaatacttgttgtacaagtaactcagttaacgaaaataagtgttgtagtaatgagcctaaggtagcaaatcaaaatgacgaatgctgtacaaataacggtgaaagcatcgattcaactcataacatttcatgtaatgctatgagtaatagttctgaagaagacgatgaagtagccaccccattttcaaattataattttaaagtaacaggtatggattgtagttcatgtgcaataaccattgaaaaagcgttaagacctttagacgatgtaactaatcctaaagttaatttttctacaagtaaattaagcgttggactaaaatctcaaagtagtattaatcaagtgactcaaacactaaaaaaattgggttatggtatcgaagaaaatgatagcaatcaaaactatacaatattttcaatagaaggtatggattgtggtagttgtgctaaaagtattgaaaaacatttgaacaatttaccctatgtaaatgacacacaagttagtttttcaactggaaaaatgcagattgattttgaaggcaatcaaactaaaaatattgaaaaagaagtttctaaaatcggttattctgctacattacaatccagtaataaaaataataatacaaagtggcgtttgtttagtaagcctattatatcaacactatttcttatccttggtattgtttcatctatggtatcactacccatttggataactaatttgatgtatatcatagctattgtagtcagtggtataaaacccttaaaaagtgcctattatgctattaaatctaagagtttagatatgaatgttttaatgtctgtagctgttattggtgccatattaattggtgagttttttgaaggcgcaatcgtcgttttactatttactattggcactttattacaaactatttctatagataaaacaagaaattctattcaatcgttaatggatattacaccagcagaagcaaacgttgtaacagagacggggataatttcaaaaaacttaaaagatattagtattggagaaattttacttgtaaaaccaggcgatcgagtaccactagatggtacgattatagaaggatattcaagtttaaatcaggcacctataactggtgaatctattcctgtagacaaaacgataaatgaagaagcttatgcaggttctattaatgaaaacgggactttaaaaatacgtgtttcaagattagttaaagataccacactgtctaaaatcattcatatggttgaagaagcacaagaaaacaaagcacctacacaagcttttatcgaccggttttctgaaatttatacacccattgtattcatattagcattattagtaatggtaatccctcctattttttctttaggaacatggggagaatggttttataaaggacttgaactacttgtcatagcatgtccgtgtgcactagttatttcgactcctgtagctattgttactgggattggtagcgcagcaaaaaaaggtgtacttatcaaaggtggcaaccatttggaagctttaggtacactttcagctttagcttttgataaaactggaacgctgactgaaggacgcccaaaagtttcagaaattaaaacaatcgaatctgacaaagaaatgtttttgaatattgcgctaagtttagaatcatactcaacgcatccaattagcaatgcaattgttgattatgtttcacaatttaaatctataacatacgatgttactgattttgaaaatattgttggacgaggtattaaaggtaaaattgaccataataatatttatgcaggaaacataaagttaatcgaatctataaatgaaaatattgtaaattataaagaagaaatatattcatatgagcaacaaggatatacagttattattattgcaacagcagataaaatccatggttttattactgttgaagacccattaaggtcggatattaagcaaacattacaacaattaaatggaagtaatattaaaaatactataatgcttacaggtgataataaaggaactgcacataaaatagcgcaactttcaggtatcaaagaggtttatgctgagttaatgcctgaagataaattatcagctatcaaagatttacaaagcaaaggctatcgtgtaggaatgattggtgatggtatcaatgatgcccctgctttagcacaaagcgaagttggtattgcaatgggcggtattggttcagatactgcaatggaaacagcagatgttgtattaatgtcagataatgtacatcaactaacagacactatcactattagtaacaaagctaagaatataattaaacaaaatatatatttctctattattattaaaatgattgcttttatcttagtattccctgggttactaacactttggttagccgtattcagcgacactggcgcagcgatattagttatactaaattcattgcgcttattaagaactaagaaaaacaatttattataagtttgtccaacagtttgaatgaaataatattaactaatacaaaagctagaacagcatttactgttctagcttttgtatttacttctatattaagtgaaattattataaaaataaaagatacgttctgtaatttcacaaattattgccaaactctggaacgtatctaaataattaattttatatttaaggtgtctaccttgacggtagtggtttatttggcaggttgatggttattttttaactataaatttcaggaaccgtctttttaacggactcaattgggcgatacacttatgtgtgttgcccttttttcaacatacaaattaaaacaacacaaaatatcaacaaattatataagcaagcagttttataatattttagtaattcattgaacacataaatcatagtgtggtcatatatatgaaaatacttagtggacaatctactatgagtttttaaattgtttataagttaagctattttgactctaagacatttatttatatataagactcgcaataaccaaaaagtaattaacaaaaacgatattgtaatcatttaatgttttgtagttaatatcttgagggataatgcaattaaagttgtactaacgatataatcgaaacacattttaaccttaggtttttcaaagatgatttttatgtaattaaagaccaaagtacataaactaaaccatgtgattacagttattataaataggattgaaaatattgctacttggatactttggttactttgatggtttataaattgaggtaatatactaatataaaatagaattgcttttggatttaaaatcatagtgatgaatccttgtttatatgacttaaataaatcgggtttttctgtatttaagccatctgatttatcatactcaaatttgtgcgcattcagtatgtttttcaaaccaagataaataatgtaggctgcacctaatattttgattaataaaaatatagtttgtgaacttacgagtataaaaataagcccaagtgttgctaatgtagcgtaaattaaatgggcactggcgatacctaatgttgtggaaataccgcttttaatgccaccatgtgtactgttttttataactgcaaaaaaactaggccccggtacaataagtatgagtaatgacataataataaagttaatccaatgattcatatgaaattcccccttatattgaattttagaaatgagttacaccttgttttcatgttaatttaataatatgcaaaatcaaataaattaacaactcattcaaataaatagttagctgttttttaaattgcgaaaatgggcgaaatggttggttggaaatagtaaggacagagaaacaataaaaaatattcaaaggctctacgttctaataaacgtaaaatatacagatttagtgtttggctattgtttccattacagtgatatttagtatcatattctacaaaatgattcacaatatatgcttaatcgtatatgcttaacgttacttaccactcatatcataatgtctataactttcaacatagttaaatggaggtagaacgatggataaggtaatggttgttgggtcttttggatcaggaaaatcaacgttttcacgtcaattatcaaagatacttaaagtccctgtttatcatttagatatgtatttttggaaaccaaattggcagatgatgcgttatgacgaacaaattaagatacataagcaattgattcaaaataataaatggataattgatggcaatgattcatcgctatttgatgaaaaaattaatgaagcagatacaatcattttatagatttacctagagtcgtttgtttttacagagtgtttaaaagatatattgcaaatataggaaaaacacgtatagatatgagagaaagttgtgaagaaaggttaactttcacattcttaaaatatatttggcgctatccaattgatagaaaaccgcaagtgctagaaaaaattaaaatgcaaagtaaccataaacatgtatttgtattgaagggtcaaaagcaaattcgaaatttttcgaggaattgttaatttatatgacgcaatatgattaaaattcgagatttttcatcttatacttagaaggttgaaatattgatttttctattaaatatattcctataatatatttaatgattataagtgtagtatatggttattgtatgttaacgtaagataagactttctcaaaaattaatttttaagtattcaattatatctacaacttagattataaaagtgttagaaaacatttagcattaacatatataagtatcaaacagaatttatttaaaaggggattcatgcaatgaagaaattgctatctatcatagtacctgtatacaacaaagagttatttttagaatcatgtgtagagtctattaataatttaaatataaataaagaagccattgaagcaatttttgtagatgattgttctagtgatcagtctttagaaataatagaagaatttgtggctaaatacaattttattaaattgattaaattaaatgaaaatacagggagcccttcggaacctagaaatgtagggataaacaatgcgcaaggtgagtatattacgtttttggatgccgatgattggttagacgcagaaggattgccaacattattaaatcaagcagtggatcatcattcagatgtcgcatttggtcaaagtgttaaacatactgaaaaagcaattaagaaattaggtagatttagctcgtataaagtcgccaatcatttagttccttatgaaattgaacgtatatttagagctgtaggtccacctggaaaaatcataaaacgtcaaattattttagataataatataaaattcaaacatatgaagtatggagaagataagttattttttatagatgcgatctcaagatgtcaaacggcgtcgatgaatccgagtccggtatatcatgttaaccgttattcttataaccaatctttagtcggcgaaacgagcattattgagaaaacacaattaaacttatctgttttagaagaagtactaaaattagatattcctgaaaacgctgaatatcaagcgattagtagaattattgaaatggattttatgtcgcgtttatttaataacaagcgatttttaaatgctgaagataagcaagcgttttatgatttgtttaatcagatggagcgcacgctagaaactcatggtaaaaatttagaatactatttattgaatgataaatttagaaatatctatcactttttaaaacatgagtcatatcaggaattatgtgatttcataaaattggttatacaaggtggaaacgctaaaaagtatgttaaagataaccaaatatattttttaatgtctgataatttaacagaagcgttacctatcaaagaacctcttttcgcagtttatgaaggcacacactttatcgataatgaaatgaaagaggtcgttcgtttatataaagatgataataaggtaattaacaaggttgtactgactgaacttaataatgaaatcaatacaatagatgtagaatttgaggaaaaaaatcaatatatttattttaggactgatgatttgaagcaatgtgattttgatttcaatattagtattatttacgatggttataaattcgtaaacgtcaatatgaacttacccaatgcaaatactactataaatcttaaaagacaaggatttaaagcagaattcatatcaacaataaaaccgaagtccaaaaaagtggacgatagtaaatatttaacatataaccctaaagcgatttctcttgtgaaacaagccaaactgtatgatgatgttgaatttaaacaacctgctcaaatgaccattgaaatgggggaattaataaatattaaagcattggtatatacgcgaaacgggacaccaagacttcagacagaaaaaggtcactatttaactgcaaataagcaatttattcaagcagttaataaatcgaaacaagcccaatatatttataatcaacctagaagcgttaacatcttgaaaaaatgtaaggaatactcaaacagaaaattcgatggagaagcagtgaatgtattatctgttagcgatcatgtagacattcaaaaaattgtactatcacctaaggggacgccaagactcaaaacttttaaagatacatttatcactgctaatcgtgattttgtagaggaaagttaagatccaagagatttaaatttggtccataaaacgaaaagtaaaaaaactaaagcgagcgacagaaatcgaatggtccaataacgatttcatagttccatctagccattcactaactggctaaaaagactaagacattttttatgtgcttagtctttttttgtaaataatgataaatctctaaaatacattgctgtcgatgtgcttatactgcattgattagcgcatggcattttattatgccctctatttatcatactttttaaattagcatccattttgcggttagatcatgaaagtaataatcaattacataatgatattcaatttcatactttaaaatactaaacaaactcaaaagaaatattctgttcacttaattgtgcgatattaaattgtgcataatacagttaggcatgcgaaactgttttgaatttgagataaaaggacagttaaagccaatttatgactaagtaagaaaaatcgacaattaaatcacgtcatatcttatagtatatatatcgaacgatagctagacgaaataagattttagtaaatatcgttcactacattaaaaacagtcataataatctaattttttatcgaggggcttattataatggaaggtttattcgaagcaatcaaaaacacagttcaagcaggtattgctggagacggcgcaaaaattggatcaggcgttttagatattatttctaacggcgcatcattaattggcaaagcattaggactttaatccagaattaaaaataatacttaaaggggcttattataatggcagacttatttaacgcaatcaaagaaacagtacaagcaggcatcgctggagacggcgcgaaattaggaacaagcattgtaagcatcgtagaaaacggtgtaggcgtattatcaaaattattcggattttagtattattaatatcataaacaatggtcagggtgataaccttggccatttttgtgttatataagtatataataatatggagaaattaaagaatatgatatatttgaaataaatatatttaagcgtactagagggtgacaaaatgagaacgaaaagtttacttatagattttgatgacacattggtggattttgatgatgcagaagcatatgcattttatgaaatgacacaacaatttcaaataaagaccaaccaaaatgatttgcatacatttaaaaaaataaatcaggcacattgggatgcttttcaaaagaatgaattaactaaagatgaagttttaagtaaacgttttgaggcatactttcatttacatcaaatgaagatagatggtaagttagctgatcaaatctttagagatgaacttgcgaatgcaccgattaaacattttgatcaaacaattgaaactttaaaacaattaaaagaacatcacgatttgtatatagtgactaatggtgttttagaaacgcaagaaagacgaattgaaaaaacgaagataggtcattggtttaaagatatttttgtttctgaacaaacaggataccaaaaaccgatgcctgaattttttgattacgtatttaataagataggtgaagataaacgaggttacgcaatgattataggtgattctatgtcttctgatattttaggtgggaaaaatgcgaatatcgagacatgttggtttaatccaagaaataaaacaaatgatacggaaattaaaccagattatgtagtgaattcgttaaaagaagtaatcgcgtatgtttaaccgttcatttaattattactaaacgaattcaagtcatataaaatgcccttcaaagttttcattttttaatgattgctttgaagggcacttttcattttattaggacccgtttgattatggagtccaaactaaaacatcatgaccatctctatttgtttcttctaaatctgtaaaaccttgtttaatgaaaaaatctttagattgatttcgtgcgatgactttgattggtaagccttgatctttggcaaaatctaataaagatgtgccataaccacgatcttgaaaatcacgtagcacttctaatttccaaattacgttataatcatcaaagcccgggaaatgagtttcctcaacttctcctttacgatatagtgccattcgagcccctaaacaatcacctacataaataccatagaaaggtgaatctgaacttgcatcaatcatttctcctcgaagttcatctactaaatacaaatctttattaccgaagtttctgaaatcttcgaatagttcgtctgttttataatttatatcaagacgctttacactactcatcgcatcttccccctttgttatcatttattctattataccttatttttatagttttttcacaaaaacgatagtttaaacatatatgtatagttgtttatatttataaaaaatagatactgaagttttttgaaaaatgaagtgatctaagtgtgtacatattatataggttattaaaatttgaaaattataagccgttaaattgtcaatgatgtatataaactttatactaattaggaatagagtaacataaggagaattacgcatggattgtatgattacaaaacttaatgaaaaagatcaatttatttctaaaatcaaagatagtgattcaaaaataggacagttttatcactttgatgctatgcaagaaaagagctatagtgaacgtttatcaatgtcgaataatggcagagaagtggcattagctcaagttattaaaaattacatgagcgacttaacattaacagagaagcaattgcaaaatatttcattattaagcgaaggcgcaaaagtcatcataggtggacaacaagctggattgtttggtgggcctttatatacttttcataaaatattttctattataacgatgagtgaaaaactctcaaaagactataatacaaatgtaataccagtattttggattgctggtgaagatcatgattttgatgaagtaaatcatacttatgcctataatgctcaaaatgcaaaattacaaaaaataaaatatcatacaatgacgccacctgaagcaagcgtctcaacatattatcctgataaagcgcaattaaaagacgcgttgaaactattttttaaagaaatgaacgaaaccacacattctaagcaactgattgaaatgtgtacgaagattattgatcagtatgatagctggacggatatgtttaaagcgttgttgaacgaagtgtttaaagcgtatggtttattattgattgacgcaaacaatactgaattacgtaaattagaacaaccatttatccaaaaaattattgaacatcatcaagatgtagatgcgtcatttagaaataatcaacaaaacacgattgctaatggattagaacaaatgatacagactgatacgaatgtacatttatttttacatgaagataacatgagacagttacttacttttaaagataatcaattttacctaagtaaatcagataaatacatgactaaagaggaattattaaaaatacttgaagttgaaccagaacgtttttcaaataacgtagtcacacgaccaataatggaagaatggttatttaatacagttgcttttattggtggtccaagtgaaattaaatattggacggaactgagtgaagtttttaatacattggatgtatcgatgccaattgtattaccacgattaagaattagttacttgtatccacgaactgaaaaattacttagtcaatatcaattaaaacagcattcgattatagaacaaggtattgaaaaagataaggaaaaattcatacgtgcgcaagcatctcaaacatttgttgataaagtggaagaaattaaggtgcaacaagaaaaattgtatcaatcactactaactgaagttgctggtaacaatgataaccagttattagtagagaaaaacaatcatatacaccaaaaacaatatgagtatttaattaataggtatttattgaatattgaaagagaaaatgaaataagtatgaagcactttaaagaattaagtgaaacacttcatccgatgggcggattgcaagaaagaatttggaatccacttcaaataatgaacgattttgggatggacgtgttcagtccctccacctaccccccactttcttacacatttgatcatattattgttaaaccctagatatgaaagggattcacccgattcatcaatttgatgaatcgggtatttttttacgctttttaagaaaaactagttaaatttgtataattagtggaggatagtggtgagatgtggtaaattatatatatgagaaggtaaggtgattataaatgttcatgggagaatacgagcaccaattggatacaaaaggacgtatgatcgttccatccaagtttcgctatgacttaaatgagcgttttataatcactcgcggccttgataaatgtttgtttggctacactttagaagaatggcaagtcatcgaagagaagatgaagacattaccaatgactaaaaaagacgcacgtaaatttatgcgtatgttcttctctggtgctgttgaagttgagttagataaacaagggcgtattaatattccacaaaatttacgccaatacgcgaacttaagtaaggaatgtacagtaataggggtttcaaatcgcattgagatttgggacagagaaacttggagcagtttctatgatgaatctgaagaaagttttgaagatattgctgaagacttaattgattttgatttttaaatggaggtgctaaattgtttcatcatgtcagtgtaatgcttaaagagaccattgattatttaaatattaaggaagatggcgtgtatgtcgactgtacattaggtggagcaggccacgcactctatttattaaatcaactcggagacgaaggtagacttattgcgatagatcaagatacaacagctatagaaaacgcaaaagaagtattgaaagaacacttacataaagtgaccttcgtccataacaactttagaaaaataactgaaattttaaatgatctgaatattgaaaaagtagatggtatttattacgaccttggtgtttctagtccgcaactggacgttcctgagcgaggttttagttaccatcatgatgcaaaactggacatgcgtatggatcaaacacaatcattatctgctttcgaagtagtaaatgaatgggaattcgaaaaattagtcagaatatttcatcgttatggtgaggaaaaattctctaaacaaattgcccgacgcatagaacaaaatagagagcaaaagccaatcgaaacgacattagaacttgtagatgttattaaagaaggtattccagctaaagcaagacgaaaaggtggacatccagctaaaagaatattccaagcaattagaattgctgtaaatgacgaattatcggcatttgaagattcattagaacaagcaattgatgcagtaaaaatggatggtagaatttcagtcatcacattccattcattggaagatcggttatgtaaacaaatgtttcaagagtacgaaaaggggccagatgtaccaaggggattaccagtaatacctgaagcatacacacctaaattgaaacgcgttaaccgtaaacctattatcgcaactgacgaagatcttgaagaaaataatcgagcgcgtagtgcgaagttacgtgttgcagaaatattaaaataaggagtgaatgttgagtggcagtagaaaagatatatcaaccttataacgacatagagacacaaatacctgagtcgccaccgtcgacccagaccaaaaccgtaaaacgcaaggtagtagttcaacttacaaagtttgagaagatgttatacataggactaataacagtaattgctttaataagtatatatatgctatctttaaaaatggatgcgtatgatactcgaggaaaaattgcagatttagatacaaaaatcgaaaaacaatcaagtgaaaacagcgcaatagaatctgaaattaaaaagaactcttcatatgaacgcatttacgataaggctaaaaacgaaggaatgagccttaagaacgacaatgtaaaggtagtgcgtaataatgtcgaagcgaaaaattagatttaaaaaacccaaatttcaaataaaacaaagtaaaataggggcagtcctactcatccttggattcggactgctcttttttacgttggttttaagatattcatatattatgttgaccggacattcttctggagaagacttaataatgaaggcaaatgagaaatacttagtaaacacccaagaacaaccagaacgagggaaaatttacgatcgaaacggcaaggtattagcagaagatgttgaacggtataaagtagttgcaattgttgataaaaaagcaagtgaaggtagcgataaacctaaacatgtaactgacaaaaagaaaactgcgaaaaaattggctaccgttgttgatatgtcggctaaagaaattgaagataaattaaataataaaaaagctttccaagttgaatttggtcaaaaaggtacagatttgacttatcaagaaaaagaaaaaatagaaaaaatgaaacttccaggtatcacactatatcctgaaaccgaaagattttatcctaatggaaactttgcgtctcatttaatcggtatggcacaaaagaatccagacaatggagaattgaaaggtgctatgggcgtagagaaagtttttgatagttatttatctggtcaaaaaggtgcgttatcttatattcatgatatctggggatatatagcgccaaatactaagaaagagcaaacacctaaacgcggtgatgatgttcatcttacactcgattcgaatattcaagtattcgttgaagaagcattggatggcatggtagaacattacaaaccaaaagatttatttgcagtagtgatggacgcacatacaggagagatattggcgtatagccaaagaccaacttttaatcctgaaactggtaaagattttggtaaaaaatgggcaaacgacttgtatcaaaatacgtatgaaccgggttctacttttaaatcatatggtttagcagcagctattcaagagggtaaatttgatccagataaaaaatatacagctgaaccaagagaagtaatgggttcaaaaatttctgactggaataaagtgggttggggtaaaatcccaatgtcacttggtttcacttattcttcaaatacattaatgatgcatttgcaagatttagtaggtgcagataaaatgaaggattggtacgagaaatttggtttcggtaagtcgacaaatggtatgtttgacggtgaagctacaggcggcatcgcttgggataatgaagctcaacagaaaacatctgcctttggtcaatctacaacagttaccccagtgcaaatgctaagagcacaatcagcattctttaatggtggtaatatgttgaaaccatggtatgttaacagtatttcaaatccagtaagcaaagatactttcttcaaaggtaagaaagaatatgcaggcaaaccgataactaaagatactgctaaaaaagttcgtactgaattagataaagtagttaatagtgaagatagtcacgcgaaaaattatcaaattgatggttatgatgtagctggtaaaacaggtaccgcacaagtagctgactcagataacggtggttatgttaatggagaaaatccttattttgttagctttattggtgatgcacctaaagatgatccagaagtgattgtttatgctggtatgagtttagctcagaaaaatgatcaagaggcatacgaaatgggtgtcagtaaggcgttcaaaccaattatggaaaacacattgaaatatctaaatgttggagataaagaatctaaagacaagtcagatgttaaatatagtgaagtacctgaagttgaaggtcaagaaactcaaaaagcgcaagataaagtgaatagcaaatcgttagaaccaatcgttattggtgacggtgagaaaattacaaaacaatcggtaactgcaaataaaaaagtattaccaaacagtaaagtcttgttactcactgatggcgatataacaatgccagatatgtcaggttggacaaaagaagaagtggtagcatttgaaaatcttgcgaatgtgaagataacgactaaaggtagtggatttgtttcacaacaatcaactaccaaaggtcagaaagtaagcaaaaatgataagattgaagtaactttatcttcagaagctattgatggtcagtcctcagaggagcaagatagtgaaaaagattcgaaagatagtaaagattcatagcacatttcgaatacggtattacattgatattatcatgcatactgctgtactaaattgaggttttaaacaatagtgcgaatattttaaagtggagtcaacactgtggaatgttgcgcttatgacctctatacataagttttaaacagtcagcatgtcgtcatgaatccacattaattaagtatataaaggagcataatatggtttatctactcgcaatcatcgcacttttaatcacatttatattagtcccagtattaataccgacattgaaaaggatgaaatttgggcaaagcatccgagaagaaggtcctcagagtcacatgaaaaaaacaggtacaccaacaatgggtggactcactttcctaattagtatcatcataacttcaattttagcgattatttttatagataattctaatcctattattttattgttatttgtaacaattggatttggtttgattggctttatagatgattacattattgttgtaaagaaaaataaccaaggcttaactagtaaacaaaagtttttagctcaaatcgcgatagcagttatattctttatattgagccaagtgtttaatttaacggacttttcaacaggaattcatataccatttatcaattttgaaattcctttgtcaattgcgtatgtaattttcatagttttttggcaagttggcttttcaaatgcagttaatttaacagatggcttagatggtttagcaactggactatcaattattggtttcgttatgtatgcaattatggcttatttccaaggtgcaacatctattggtttattctgtattatcatgatttttgcattattaggattcttaccatttaacttaaaccctgcaaaagtatttatgggtgacacaggtagtttagccttaggtggtatctttgctacgatttctattatgttaaaccaagaactttcattgctatttattggatttgtattcgtagctgaaacattatcagtgatgatacaagtaacatcatttaaattaacaggtaaacgtattttcaaaatgtcacctttacatcaccatttcgaacttgtcggttggaatgaaactaaagtagtaacggtattttggacagtcggtctaattacaggactaattggtttatggattggagtgagttaacatgcttaaatatagaggattagaaaataaaaatgttttagtcattggactagcaaaaagtggctatgaggcagcgaaattattaaataaacttggcgcaaatgtgattgtgaatgatggtaaagatttaagtcaggatgcacatgcaattgatttagaaaatgagggtattaaagtcattggtggagaacatccattgtctttactggatagtcatcccattattgtgaaaaatccggggataccttatacagtacctttgatagaagcggctgttgaaaaaggtttaactattttaactgaagttgaattgagttacttaatatcggaagcaccaattataggtgtaacgggtacaaatggtaaaacaactgtgacttcattaattggagatatgttccaaaaaagtagagtgactgggaaattgtctggtaacattggctatgtggcttctaaagtagcacaagaagtgactgctgacgattacttagtgactgaattatcttcattccagttattaggaattgatcaatataaacctcacattgctattattacaaatatctattctgcacatttagactatcatgaaactttagacaattaccaaaatgccaaaaagcaaatttataaaaaccaaactgaaaatgattatttaatatgtaattatcatcaacgtcatttaattgaatcagagacactaagagcaaaaacgtattatttttcaacacaacaagaagttgatgggatatatgttaaagatgactacatcgttttcaaaggttttagaattatccataaagacgatttagtattaccaggagagcataatttagaaaatattcttgctgctgtattggctgcgctactttcaggtatatccgttaaagccattattgatagtttgacttctttttctggcattgagcatagattacaatatattggcacgaataaaacaaataaatattataatgactctaaagcgacgaatacacttgcgacacaatttgcattggattcgtttaaacaaccaataatttggttatgtggtggcttagatagaggaaatgattttgatgaattaattcctcatatgaaaaatgtcagaatgatggtcgctttcggtgaaacgaaagaaaaatttatcaaattaggtgaaagtcaaggaaagtatgtaattacagcaaacgacgtgcaagatgctgttgataaaattcagtcagttatagagccaaacgatgttgtgttactttctccggcttgcgcaagttgggatcaatacaatacttttgaagagcgaggaaataagttcattaaaagtttccaagcaaatttaccttctttttaaagggtgtgaaaatgaatggctgataaagtaaaagaatttgattcggattatttgaaagaaaaaagagcaaaacgacgaaaaagacagaaacaaattcaatattcaatatttggtgttttgttattcatcatcattttaatcttgatttatatgtttacgcccttaagtaaagttaatagtgtgaagatagctggaaacgataatgtttctaaaagtacgatagataaagctattaatgtaaaaagcagttcacgaatgtatacgtatagtacaacaaaagctaaaaacaatttagaagacaacgagcttatcaaaagtgcagaagttaaaaaagtttttccaaataaactatccgttaaagtgactgaaaagcaaatcgttgcgatggttcaaaagaaagataattatgtgccaattttagaagatggatcagaattaaagaattatgatggaaatgcgacggatgatggcccaattcttgaagggtttgaaaaagataaaaaagaaaaaattattcatgaattatcaagtatgccagcaaatgtgagaagcatgattgcagaaattaaatacgatcctcaagaaaatgcgcaaagccaaatcaaattatttacaacagatgaaatacaaatagtaggtaatttaaatacaattgctaataaaatgaagtattatccacaaatgtcgcaatccttagaacgtgatgaatctggtaacttgaaaaaatcagggtatattgatttatcagtaggtgcatcatttattccatatagtgatggaggtagtacaaaatctacgagcgagcaaaatgtacagaaaaaaacaagcgaagaaaatgaagcaaaagatgagttgcaaagtgcattaaatagaattgcagataagtcaaacgaaaataattaaaaaatttagacaaacacatgtgtttatagttcacaagcgttaaaacgtattgtaaactgttaatagtgtcaacttgaataagtgattgtcaggaggtgcctatctatggaagagcattattatgtaagtatagatatcggttcatcaagtgttaaaacaatagtgggcgaaaaatttcacaacggaataaatgtgataggtacaggacagacctacacaagtgggattaaaaatggtcttattgatgacttcgatattgcgaaacaagcgataaaagatacaatcaaaaaagcctctattgcttcaggagtagatataaaggaagtctttttaaaacttccaataatcggaacagaagtatttgatgagtctaatgaaatagaattttatgaagatactgaattaaatggtacgcacattgaaagtgtgcttgaaagtattagagacaaaaatgatgtaccagaaactgaaattattaacgcatttccaattaaatttgttgttgatggcgaaaatgaagtttctgatccaaaagaactgattgcaagacatagtttgaaagttgaagcaggcgtcatcgcaattcaaaaatcaattttaattaatatgattaaatgtgttgagtcttgtggagtagatgtactagatgtttattctgacgcatataattatggctcagtgctttctgctactgaaaaagaattaggtgcttgtgtaattgatattggtgaagacatcacacaacttgcgttttatgaacgtggagaattagttgatgcagatgctttagaaatggcaggtcgtgatattactgaagatatagccaaagggttaaatacttcatttgagactgctgaaaaagttaaacatcaatatggacacgctttctttgaatctgcatcggatcaagatatctttactgttgatcaagtagatagcgaagaagatgttcaatttactcaaaaagatttagcagatattatcgaagcacgagttgaagatattttcttcaatgtatttgaggttttacaagacttaggtcttacaaaagtaaacggcggtttcgtagttactggtggttcggctaatttattaggagtcaaagaattgttgcaagatatggtgagtgagaaagttagaattcatacaccatcacaaatgggaattagaaagcctgaattctcatcagcaatttcaacaatttctagtagcattactttcgacgaattgctagattatgttacaattagtaatcgtgacagtgaagaattcgaagaggaagtcatcgaatctgatgaaagagaacacagtacaaaatcaagcggatttgattggttcaagaaaaaatcgaacaagcaagatgatgaacttcaagctacttcttcagaatcaactcgaacaaaagaatctgttgttgatgaagaagaaccagaggtatacgacgatgaagtaaatgtcgaacacgatgaagaacttaaacctcaggaaaaagaagaaggtaaatttaaaaaacttatgaaatctctattcgattgattggccattaaaactnagaggaaatataaatgttagaatttgaacaaggatttaatcatttagcgacgttaaaagtcatcggtgtagggggcggcggtaataacgctgtaaaccgtatgattgaccatggtatgaataatgttgagtttatttctattaatacggatggacaagctttaaacttatctaaagctgagtcaaaaatccaaattggtgaaaaattaactcgtggtttaggcgctggcgctaaccctgaaattggtaaaaaagcagctgaagaatcacgtgaacaaattgaagatgcaatccaaggtgcagatatggtattcgtaactgctggtatgggtggcggtacaggtactggtgcagcacctgtagtagctaaaattgctaaagaaatgggtgcgttaacagttggtgttgtaacacgtccatttggttttgaaggtcgtaagcgtcaaactcaagctgcagcaggtgtagaagctatgaaagctgctgttgatacattaattgttattcctaatgaccgtttattagatatcgttgataaatcaacacctatgatggaagcatttaaagaagctgataatgtattacgccaaggtgttcaaggtatttctgatttaatcgcagtatcaggtgaagttaaccttgactttgcagacgttaaaacaattatgtctaaccaaggttcagcattaatgggtatcggtgtttcttctggcgaaaatcgtgctgttgaagctgctaaaaaagcaatttcatcaccattattagaaacttcaatcgttggtgcacaaggtgtgcttatgaatattacaggtggagaatcattatcattattcgaagctcaagaagcagcagacatcgtacaagatgcagctgacgaagatgttaatatgatatttggtactgtaattaatcctgaactacaagatgaaattgttgtaacagtaatcgcaactggttttgaagataaaccttcatcacaaggtcgcaaagcttcaaacacaggatttggaagcagtgctacaagcagcaatacaactaaagaagacacattcgcttcaaacacaacgaatgcgtctcaatcatcagatagtgctagtgaaggtagagcacatactacgaatgaagatgacattccaagctttattagaaatagagaagaaagacgttcaagaagaactagacgttaatttaaaatctttttgtaatatatgattataaataaaagttgagtctgaggcataaacaatgcttcaggcttttttctgatatgataaagtatcgcttatccatagaactactttatagaactacttttcagaactactttttcatttatgaataatagtagttcttatacatgagctttagctcaggtaatccgttttcttactgtttctttttcaaatttaaagaaaataaaatgagtcggcttccaattacaaatggatctactcatagatttacaaatgctagtataaatagagatattttattataattaaagtgtgtctgttatatgaatgacaaatgtttttcagataagcagaaagttgaaactagccattattttggaagggcatgttgattcgtaatattaaaattgaataatataaattaatggaggttcgttgtgatgcaagataaatttattaaaaagcgtcatatcttggaatatgaggataaacaattaataaatgtaaaactgggtataacaacaagagaagacggtttaagtccatatcctcataatgcgtttaatatggcaagatatattgatgattctcagcaaaatattacgaaacatcaagaaatgcttgcaacagttattggatttccaagagaacaatgggtcttccctatccaaacacatgaaaacaaagttgttaaagtaactagcaacgataaaggaacaaatattgatgcgttaaatgatgcattgcatggtgtagacgcactatatacttatgaacccaatctattacttacaatgtgctatgcagattgtgtcccaatatatttttacagtgaaaaacatcattttattggactggcgcatgctggttggagagggacggttggacaaatcgtgaatgcattaatctcaaatattgattttgacttaaatgatttaaatgttgttattggacctgctacttcgacatcatatgaaattaatgatgatattaaatcaaaatttgaaacgcttcccattgatatcaaccaatatattgatactagaggcacagacagacatggtattgatttaaaatgcgccaatgcattattacttgaaaatgcgggtgttcccaaagataatatatatataacaaattatgcgacatctgaagatttatctttgttcttttcctatcgagttgaaaaggggaacacaggtagaatgttagcatttattggtcaataatgaagaggtgtttaaagttggatgtacaatataatttagaaaaaataaatgaacaaattgaagcacattgtaaaaaaggtaatattacaacgaagccagacgtgatagcagtgacaaagtatgttacaatagaccgagctaatgatgcatataatgttggcattagacatttcggtgaaaatcgtttagaaggctttcaacaaaagaaagcagctttaccagatgatgttgtgatgcactttattggttcattgcaaacacgaaaagtgaaagatgttatcaatgaaatagattattttcacgcgttggatcggttaaaattggcaaaagaaatcaataaacgtgctgaacataaaattaagtgttttgttcaagtcaatgtttcaggtgaatcatcgaaacaaggtgtttcattatctgaagtagaaacatttataaaagaattaaagcaatatgaaaatatagaaattataggacttatgactatggcgccattaactgacgatgagtcatatattaaacgtttatttcaattattaaaattaaaaagagatgaaattaaagcgctcaatttaaattatgcaccatgtactgagttgtcaatgggaatgagtaatgatttccatttagctgctgaagaaggtgcatcatttgtgagaattgggactaaacttgtaggaaaagaggagtgagccccgtggctttaaaagatttatttagtggatttttcgtggttgaagaggaagatgacgaattagaagcaccaccagaagaaaatgagcaacaagaaagacaacaacctaaacaacaagcgcagtctcaaaatcaatttacagaacaacctagaaatgtgaattcagaaagaccgagatcgattcaatccgtgcccaaaaagcagtcaactagattgcaacaatcatcgggtgaaaggaagtatcaaatgaataacactacatcaaaaaataatgctaggaacgttgtgaatatgaataatcaagagcaagaaaattatgattttacacaagaaagttctaaaatgtgtttatttgaaccacgtgttttttcagatacacaagatatagctgacgaattaaaaaatcgtcgtgcaacattagttaacttacaacgtatcgataaagtatcagctaaacgcatcatagactttttaagtggtactgtatatgcgattggtggagacatccaacgcgtcggatcagatatattcttatgtacaccagacaatgttgaagttgctggcagtatcacggatcaaatagaaaatatggaataccaaggtgaatagaggttaaaaataaatggatataggtttattagcaaatatatttaattttattttattcttggttcaaatttattattatggaatgattgtttatttctttatgtcgtggattccaaatgcacgagaaaacagatttggtcaatttttagccaaaatttatgaaccatttttagaacaattccgtaagattattccgccgctcggaatgattgatatttcgtcaattgttgccatcattgtacttgtattattcagaagtggattggcaagtatcttcaatcttattttgagtaaattaatgtaatgattaaagcaataattaatatttagagtgaatttaaaaaagtatgtataaaataaatgataagcacctacgttcatagacgcgaggtgctttgtcttgtatttggggtgagcgtcatagatatatatcagcattttagaaaagaagagcatgaattaatagatcaacttatagataaatgtaatcgggctaatgatcaatattcgcctattttaacgccatttttagatccacgtggtcagtatattatgaatgtggtggctggcagttttgaagatttagaagttacattttatggtgggccattcgcggaaagaaaaagagcgatgattgcgccaagttattttcaaccagatgcagaggcatttgaaattgtattaattgaaatagattatcctcaaaaatttgtaacattacagcaccaacacatattgggtacaatcatgtctttaggtattgaaagagatcaactaggtgacattgttgtagatgatcgaattcaatttactttgacaaaacaattagaatcttatattatattggaattaactaaaatcaaaggtgcttcagttaaacttaattctattcctataaaagatatgatacaatcaaaagagcattggctatcttttgaaacgactgtcagtggtttaagattagatgtcgtattaaaagagatggtgcgtaaatcacgctcgatagctaagcaacttattgataaaaagcgtgttaaagtcaaccatacagtgattgatgctgcagatttccaactagatagtggggatttgttgtctatccaaggatttggaagagcgatgattactgatattggtggtaaaacaaaaaaagataaaatacgcatttcatataaaacgctgtttaaataatatgaagtttatgaaagcgaatataaacactttgcacaattaactaaatgatatattataaaagaatattgtaggaaaaacactatttatcttatttaatcaaagctgataatagtgtattatagaaggaggatcatgtatgccttttacaccaagtgaaataaaaaacaaaacatttactcaagtaaaaagtgggtttgaacctaaagaagttgaagactatttagaacaattaagtaatgaaattgaacgtctaaaagaagacaaagctcagttagaaaaagtcattgaagataaagaaacaaatattcaatcttacaaggatgtacatcaatccgtaagtgatgctttaattcaagcaaaacatgctggtgaggaaactaaagcagctgctacaaaagaagcagaagcaacagtagcaaaagcaaaagcagaagcggataaaattgttaatgatggtgtggaaaaagcacgtcgcttatctttccaaacagaagatatgaaacgtcaatcaaaaattttcagatcgcgtttccgtatgctagttgaagcacaattagatttacttaaaagtgaagattgggattacttattaaattatgatttggattctgaacaagtgactcaagaaaatattaatcatttgaatgaaaaggatttaactgaagaagaaaaagctatgaaagcaaaagcagaagcagataatactgcacaatcaaatgatgatccgaataaagcataaggataacagacacgtttgaaacgaaacacatatcaaagcgagttaggaatagtgagagcctttcatatgtgcgtttctaatatcactgttgtcacaatttatataacataaatgagagaactctaagttgagttaaccagggtggtaacgcggtcaatatcgtccctgttaattgaacttagggttcttttattgtataaaatgaactaacttagaaaatcggaagaaggagtgtattgaaaatggattataaagatacgttgttaatgccaaaaacagatttcccaatgcgtggaggtttgccaaataaagagccaaaaatacaagaagaatgggatgccaaaaatatttatcaaaaagtattagataaaaatgaaggtaatccgtcatttattttacatgatggaccaccgtatgcgaatggtaatttacacatgggccatgccttaaataaaattcttaaagatattattacgagatataaatccatgcttggttactatgcaccatacgttccaggttgggatacacatggtcttccaattgaacaagcattgactaaaaagggcgttaaacgtaaagaactatcaatcgctgaatttagaaaaaaatgtgaagcatttgcattagaacaaatcgacaaccagaaaaaagattttaaacgtttaggtgttaaaggtgattttaataatccatacattacgcttaaacctgaatatgaagcagctcaaattcgtttgtttggtgaaatggcagacaaaggattaatttataaaggtaaaaaacctgtttattggtcaccatcaagtgaatcgtcattagctgaagctgaaattgaatatcaagataaacgttcaccgtctatttatgtagcttttgatgttatagatggtaaaggtattgtagatgacgatgcacaattcatcatctggacaacaacaccatggactttaccttcaaatgttgccattacagtacacccagatttaacttatggtcaatataatgttaacggcaaaaaatatattatcggtaaagatttagcgagtgatgtggctgaagcgctagattgggacgaagatactttagaattagaaaaagaattcaaaggtaaagacttagagtacattaaagcgcaacatccattctttgatcgtgaatcattagttatcaacgggttacacgttactactgatgcaggtacaggttgtgtacacacagcaccaggtcatggtgaagatgactatattgttggtcaaaaatacaatttacctgttatcagtcctgttgatgataaaggtgtgttcactgatgaagcaggtcaatttgaaggcatgttctatgataaagcaaacaaagaaatcacagatttattaaaagaagatggctcattattaaaattagaatttattacacatagttaccctcatgattggcgtactaagaaaccagtgatctttagagcgacaccacaatggtttgcttctattgataaagtacgtgaggacatcttaagtgcaatagacgatacgcaattcaaagttgattggggtaaaacacgtatctataatatgattcgtgatcgtggagaatgggttatttctcgccaacgtgtatggggtgtgccattaccagtattttatgcagaaaatggtgacatcatcatgacaagtgagaccgtaaaccatgttgcagatttatttgaagcaaatggttcaaatatttggtttgaacgtgaagcgaaagatttactgccagaaggttttacacatcctggtagccctaacggcgaattcacaaaagaaacggatatcatggatgtatggtttgattcaggttcttcacaccgtggtgtattagaggcacgtccagaattatcatatcctgcagatttatatcttgaaggtagtgaccagtatcgtggttggtttaactcttcaataacaacttctgtagctacaaggggacaatcaccatataaaatgttactttctcatggctttgtcatggatggcgaaggtaaaaaaatgagtaaatcattaggaaatgtgattgttcctgatcaaatcgttaaacaaaaaggtgcagacattgcacgtctatgggtaagtagtgtagattatttagcagatgttcgtatatctgatgaaatcttaaaacaatcttctgatgtatatcgtaagattagaaatacgctaagatttatgctaggaaatgtgagtgattataaccctgccacagacgctatcgcagaaaaagatttactagaagtagataaatatttattaaatagattacgtgaatttactgcaaacacattagatcactatgataactatgattatttagatatttaccaagaagttcaaaactttatcaatgtggaattaagtaatttctatctagattatggtaaagatattctatatattgaagaacgtgattcacacaaacgtcgcagcatgcaaacggtgttataccaaattgtagtagatatgacaaaactacttgcaccgattttagttcatactgctgaagaagtttggtctcatattccacacgtagaagaagagagtgtacatttaacaaatatgccagagcgcgtagaaattgatcaagcgtttgttgatagatggaatacatttatgaaattacgtgatgatgttaaccgtgcattagaagttgcacgtaatgaaaaagtaatcggtaaatcactcgaagcaaaagttgtgattggctctaatgaaaacttcgatgcgacgacattcttacaacaattcaaagatttacaacaactatttatcacttctcaagctgaagttgtcgataaagtagatgacggtgttgcatatcaacatggtgatatccgtatcgaacatgctcatggagaaaaatgtgaacgttgttggaattatagtgaggaattaggttcagtaggtgaattagataacttatgtcctcgttgtcaagcagttgtaaaaacacttgtataagaattagaaagtaagtaaaaatgattcaataagttcaaaggttacttatatttgcattcagcaaattaagtaaccttttcttatggcaataattgttgttataatttagtgaaaataaaatgctaatggcgcggatgtacagtaatatcaataatgaaggacgtatgaattagcataggtagatagataaaaattaaacgtaaagtgtcattttaatgaataagaaattgacatttggaaaggtgtttgtcatgtttcataatcaaagtgctcattttgtaaatggcatcacattaaatgtaagagataaagaagcaatgaagcatttttatcaagacatattaggattgaatgtagtgaatgaatcactatctattgttcattatgaaataggaaatatgaatcattttttaacattaaatcaaataaatatggggagagagccattaacatcggaagctggcttatttcatttagctataaagttaccttcaaagacagacttagcagatttacttgtacagttaagtgaatatacaattccagttaacggcggtgaacacgaaacggctacctcaatttttctagaggatcctgaaggcaatggacttgaattctatgtcgataatccaatggaagattggtcttttgaaaatggacaagttgtattagagacccaaccgattaatgtgccacatctattgacttatgtatcaaatgaaaagtggcaaggcattccagatgaaagtattattggttatattaatctaaagacaatagagttaaaacgtattaaattatattacaagcgattttttggtttagaaccatccgctttagaaaccaatcattcagtatatttatcatcaaatggttatcatcagcatatcgttgtgaataattggtactctagtatcaaacgtattgaaaatgaacgtacctatggtttggcttgtgtagattaccattatcctgaatcgactcataaacgcttaactggacccgatgggattcaatttagattcaatttctacaaagtgatataaagaagcgaaataaaaaatgaaaagcatagttagaaatttcctgattgcatcggtataattttaaacgtcaaaatttcgtataggaaatgtagtttttttacagataatgaaactgtaactttttttataagtttgagtaggatataatgagagttgttgtaaaagcgactgaacgtagaataggaggtacggacatgaaacgtcagtactatattggtatttctttattcataacaatcattatattagtattagatcaaatcacaaaatttattattgctagttcaatgaaagtgggagattcatttgaagttattcccaactttttaaatataacttcgcatcgtaatgatggtgcagcttggggaattttaagtggaaagatgagttttttctttattatcacaatcattatactggttgtactcatcgtattttatataaaagaagcgaaaaacaatttattgatgcaaatcgcaattagtttattgtttgctggtgcattagggaacttcatcgatcgtgtgttacatggagaagttgtagactttgtagatacatatatctttggatataattttccaatatttaatgtagctgactcaagtttaacgataggcgttttattaattattatcgctttgctaacagatatgaagaaagaagaataggagagatattgtatggatatacatcagtttaagattgaaaatccagaagatacaggccaacgtatcgataaattactacctgaatatcattcagagtggtcacgtacacaaattcaagactggattaaagcttctctagtaaaagtaaacgaccaggtcattaaatctaattataagacaaaaatgaatgatcacattgttgtaaccgaaaaagaaaccgttgaagcggatattcaaccagaaaatttaaatttagatatttattatgaagatgatgatgtagcgattgtatataaacctaaaggtatggttgtgcatccatctgcaggtcattataccggtacattagtgaatggtctaatgtatcaaatgaaaaatttatcaggtattaacggtgaaatacgtccaggtattgtacatcgtattgataaagatacctcaggtttactcatggttgctaaaaatgatgtggcacatcgtagtttagttgatcaactcgttaataaaaccgtgacacgtaaatatgtcgctttggtacatggtaatattcctcatgattatggtactgttgatgcgccgattggtagaaataaaaacgatcgtcaatctatggatgttgtagatgatggtaaagaggcggttacacattttaatgttttagaacattttaataaatacacattaatagagtgtcaattagaaaccggacgtacccaccaaatccgtgtgcatatgaaatatattggttatccattagttggtgaccccaaatatggccctaaaaaaacattagatataggtggccaagcgttacacgctggaattattggctttgaacatccagttacacatgagtatattgaaaaatcaactgcattacctgaagattttgaacagttattgtcagaattacgtagaagtgataaataaaaatgataaaattttataaaatggattattaaacattcatagtgcctaatttttaattaatcaaactgtcatttccactaaagatacacattttaaattgaaacaagcataccgttttctgtctcactactgtgtttatttcttaagtggcttgcaagtgaatgcgtttcatggtagtatggtgacagtttaataaagagcgtacgtctttaattgtaagtccagagaggcttcgaagacatgtatttattaaaggtagacaaacaatatttttctcatttgagaaaaatacctgttgtagttagtatcatataacgcaacggaagatacagtcgttagtaaaaacactgtaaagagaaatcagcttggataagaaagcatatgtctcttatacgtttgtcatacactttaacaaacctcatgtcttaataaagacatgaggttttctttatatcatcatcattttaaaaggtaggtgcctaagatgtcagaacgcattattatggatgaagcggcaattcaacgtactgtgacacgtattgcacacgaaattttagaatataataaaggtactgataatttaatcttattaggtattaagacacgtggcgcatttttagcaagaagaattcaacaaaaaattgagcaaattgatgaaattgctgtgcctacaggtacaatcgatataacacaatttagagatgatttggaacaaacgataaatcaagtagatgaaagatcatatgaaattgatgtaaacattactaatcaagtagtcattattatcgatgatgtcttatatactggtagaactgtaagagcgtcactagatgcagtgttacagtatgctaggccgaagaagattgggctagcgacactagtagatagagggcatagagagttaccaataagagctgactttgtaggtaaaaatatcccgacagccaaggaagaagatgtttcagtatatttagaagaaatagatgaaagaaatgcagttgtaattgaataacaccttttaattcggtacgagagactgaaaaaggggagagggttaaacggatgcaataatattgataaatgttttattgtaatacatccgtttataaattaaacaattaatgaaacaacctcttcaattatctaattttatttttaaagcacattaatattatagaagttacataactttttatatgtgtatgagtaaattagataatatactttttagtctctttacatgaatttaatgtaaagagatttttttatgagaggaagcataaccatggaaaatgaaacaatgtttgaacggacagtcaagccagtattagatgtacaagataaaccaaaaattggacagtgggcatttttaagtacacagcatttattcgcaatgtttggttcgaccgtacttgtaccatttttaactggattacccatatcatcagcgcttttagcatcaggtataggaacattgctttatatcctaataacaaaagctaagataccagcatatttaggatcgagctttgcatttatcacaccgattataacggggttaaattctcatagccttggtgatatgctgatggcactctttatgagcggcgtgatgtacgtattaataggcttagcaattagattgagtggtacgggctggcttatgcatcttttgccacctgttgttgtaggaccagtgattatggtcataggattgagtttagcaccaacagcagttaatatggccatgtttgagaactcaggggacatgaaaggttacaacttaagttacttgattgtagctatgattacgttattagtaacaattattgttcaaggttattttaaaggattcttatcactcattcctgttctaataggaatcataacaggttacatcgtttcggcttgtatgggattagtcaactttgcaccgattgctaaagcaaaatggctacagtttccagaagtctacataccatttaaagattatacaccttcgtttcatctaggactcatactcgtcttgatacctattgtatttgtgacggtaagtgaacatatcgggcaccaaatggttatcaataagattgtaggacgtaattttttcaaggatccaggcttagacaaatcaatcattggtgatggtgtttcaaccatgtttgcaagtattatcggaggtcctccaagtacaacatatggtgaaaatatcggcgttttagcaatcacaaaaatttatagtgtttatgtgattggtggcgcagcagtcattgcaatcattttaggatttgtcgggaaatttacagcactggtttcatctataccaaccccagtcatgggtggggtatccatcctgttatttggcattatcgcagcaagtggcttgaggatgttagtggaaagtgaagtagattttgcgagcaatagaaacctagtcattgcatcggtcatacttgttattggtattggcaatctagtattcaatttaaatggattagggattaacttagaaatagaaggtatggcattagcagcgttagcaggtattatacttaacttgattttacctaaaacagcaccaaacaataattaaaagaaattctgatgatgagggagctgaataaaaatggataatttactttcaatggaatgcttaaatacgactgaaatttacgatctaatacaacgtgcgagcgcttttaaaaatggtaacgcgcagccaggatgttttgaagataaatttgttgctaatctattctttgaaaattccacacgtacaaaaagtagttttttagtagcggaacaaaaattaggactaaagttaatagattttgagacaagtacatcatccgttcaaaaaggtgaatcattgtatgatacttgtaaaacgctggaacaaattggtgccaatgtgttagttattcgacattcacaaacaacttattatgatgaattaaagcatttaaatatacctatcatcaatgctggagatggtagcggacaacatccgacacaaagtttactagacctcatgacaatttacgaagaatacaagacttttgaaggtttgaatgtacttatctgtggtgatgtcaagaactcacgtgtagcgaaaagtaattaccaaagtctaacagcattaggtgcgcatgtcatgttctctagtccagatgaatggaaagatgaaacattagaagcaccttatgttgatattgatgaagtgattgatcgaatcgatattgtcatgttgttaagagtccaacacgagagacatgaggatagtgaagttactagctttgaagtgagtcaatatcatgaaaattttggtttaacgcaatcacgttatgatttattgaaagatcgagcaattatcatgcatcctgcaccagtaaatcgcggtgtagaaattgaagatacattagtagaagcaccgaaatcacgtatttttaaacaaatggaaaatggtatgtatatacgtatggcagttatagatcatatcttacaaacggaaggggcaacagcaaaatgaaattattaacaaatgcaaaaatcttaaaaaatggtgaattaacgacggtatcgattttaattgagggacaacatattaaaaaaatcgcaccacacattgatgttatatcagagactgaagtcatagacgttaaaggacaattcgtttcgccaggattagttgatgtccatgtccatttacgtgaaccaggcggtgaacacaaagaaacaatagaaacgggtacgaaagcagcggcgagaggtggatttactacagtatgtccaatgccgaatacgaaacctgtgcctgattcagaagaaaatctgaatcgcttaaaccaattaattgaagaaaatgcacaagtaagagtattgccatatgcagcaatcacagttagacaggctgggaaagaacacgtggactttgaaacacttgctaacaacggtgcattcgcatttacagatgatggtgttggtgtacaacaagctagcatgatgtacgaagctatgcaagcggctgcaaaagtaaataaagcagttgttgcacattgtgaagataacagtttaatatacggcggagcaatgcacgaaggtcagcgtagtgaagcgttaggtataccaggtattccaaatatatgtgaagctgtacaaatcgcgagagatgttttactggcagaagcagcaggcgcacattatcatgtatgtcacgtatctacaaaggaaagtgtcagaacaattagagatgctaaaaaggcaggcattcatgtaactgctgaagtcacaccacaccatttattattaacagaagatgatgtaccaggtgatgatgctatttataaaatgaacccgcctttaagaagtaaagaggatagagaggcattattagaaggtttattagatggcacgattgattgtatagctacggatcatgcaccacatgcagcagaagaaaagaatcagccaatgacgaaagcaccatttggtatagttggaagtgaaacagcgttcccattactatacactcatttcgttaaaaatggagattggacacttcaacaattggtagattatttaacaatcaaacctgcacaaacatttgatttaccttttggaagattggaagaaggttatttagcagatttaacagtcattaacttagaagaagaaagcgaaattaaagcagaagattttgcatctaaaggaaccaatacaccatttatcggttacaaagtttacggtacacccgtattaacaatggttgaaggcgaagttaaatttgaggaggaagaataatgttgaaaaaacgttatctcgtattagaagatggttcatattatgaaggttatccaataggttcagatcaattaacattaggagaaattgtatttaacacagctatgactggttaccaagaaacaatttcagatccatcatatactggtcaaattattacatttacttatccattaattggtaattatggtattaacagagatgattttgaagcacttgttccaacgttaaatggtgttgtagtgaaagaagcgagtcgccaaccaagtaatttcagaaagcaaaagacattccatgaagtattacaagaatatgatataccaggaatttcaggtgtagatacacgtagcattacacgtaaaataagaaacaatggtgtattaaaagcaggttttacagatgaaaaaagtgaaattgattcaatgattgcaaagctgcaatccgttgaattgccgcgaaatgaagtcacaactgtttctactaaatcaccatatgtttctacaggttatggacttagcgtcgtactagtagattttggaaaaaaacaaaacatagttagagaattaaacgcgcgtggttgtaatgtaactgtagtgccttatgacacttcagcagaagcgattattcgcatgtcacctgatggtgttatgctgtcaaatggcccaggtgaccctgaagaagtccatgtagctgttgaaatgattaaaggcattttagggaaaataccattttttggtatttgtttaggacatcaattatttgcattatcacaaggtgctacgtcatttaagatgaaatttggtcatagaggggctaaccatccggttaaagatttaaaaactggaaagatagctttaacaagtcaaaatcatggttatgccattgacaaagcatctctaaaaaatactgacctagaagtgacacatattgcaattaatgatgatacggttgagggcttgagacataaatcattaccagctttttcagtacaatatcatccagaagcatgtccaggaccatcagattcaaactacttattcgatgaatttatagacatgataaatgaatataaaacaaaggagcttacaaataatgcctaaacgtcaagatatagaaaccattttagtaataggatcaggaccaattattatcggtcaagctgcagagtttgattatgctggaactcaagcttgtcttgcgttaaaagaagaaggataccgcgtcattttagtgaattccaatcctgcaacaattatgacggataacgaaattgcagataaagtttatattgagcctttaacacatgacttcatcgcacgtattatacgtaaagaacaaccagatgcattattacctacacttggtggccaaactggtttgaatatggcgattcagttgcatgatagtggtgaactagaagcgaataatgtaaaactattaggtactgaattggaatccattcaacaggcggaagatagagagttatttagaacacttatgaacgatttaggcgtaccagttcctgaaagtgatatcgttaatacagttgaacaagcttttgcttttaaagaagaagtgggttatccactcatcgttagacctgcattcacaatgggtggcacaggtggcggtatttgtcacaatgatgcagaattcaaagaaattgtaacaaacggtctacattatagtccggcaacacaatgtctaattgaaaaatcaattgcaggatttaaagaaatagaatatgaggttatgcgtgataaaaacgataacgcaatcgtagtttgtaatatggaaaatattgaccctgtcggcatacatacaggtgattcaatcgttgttgcaccaagccaaacactatcagatgtagagtatcaaatgttacgtgatgtatcattgaaagttattcgagcgctcggtatagaaggtggatgtaatgtgcaattagcattagacccacactcattagattattatattattgaagtgaatccacgtgtttcaagatcatctgcattagcttcaaaagcaacgggctatccgattgctaaattagcagctaaaatcgctattggtttaacactagatgaaatgttaaatccgataacagaaacatcctatgcagcatttgagccaactttagattatgtaatttctaaaattcctcgtttcccatttgataaattcgaaaaaggagaacgtgtcttaggaactcaaatgaaagcaactggtgaagtaatggcaattggtagaacatatgaagaatcactactaaaagcaattcgttccttagaatatggtgtacatcacttaggattacctaatggtgaaacatttgatttaggttatattaaagaacgtattcaagaccaagatgatgaacgtttattctttataggtgaggcaattcgcagaggtactacattagaagaaatacatgaaatgacaaaaatagattatttcttcttaaataaattccaacacatcatagatattgaacacgatttgaaatcaaataaaggtgacattgattatttaaaattcgcaaaaaattacggttttagtgatagagtaatcgcacatcgattcgatatgacagaagaagaggtgtacgatttaagacaacaaaacggcattataccagtgtataaaatggttgatacatgtgctgcagaatttgaatctgctacgccttattattacggcacgtatgaatatgaaaatgaatctgtagtcacagagaaagaaaaaattcttgtcttaggttcaggacctattagaattggacaaggtgtagaatttgattacgccactgtacatgctgtatgggcaattcaacaagcgggctacgaagcgattatagttaataacaatccagaaactgtttcgaccgacttttctatttcggataaattatactttgaaccgttaactgaagaagatgtcatgaacattatagatttagagcaacctaaaggtgtcgttgtacagtttggtgggcaaacggccattaacttagccgataaactagcgaaacatgacgtgaagattttaggaacatcattagaagatttaaatagagcagaagaccgtaaagagtttgaagcgttattacacacgattgatgtaccacaacctaatggtaaaactgcaacgtcaccacaagaagcattagaaaatgcacgcagtattggctatccagtcgtcgtcagaccttcttatgtattaggtggtcgcgctatggaaatcgttaatagtgatgcagaattagaagactacatgaatcaagcagttaaagcaagtccagaccatccggtattagtcgatagatatttgacaggtaaagagattgaagtagatgcgatttctgatggtgaaacagtgattataccaggtattatggaacatattgaaagagcgggagtccattcaggtgattccattgctgtttatccaccacaaacgttaaagcaagaagaaatgacaacattagaagactttacgattcgtttagcaaaaggcttaaacattgttggtttaattaacattcaatttgtaattgcgcatgatggtgtatatgtattagaagtgaatccacgttcgagtcgtacagtaccatttttaagcaagattacgaatattcaaatggcacagttagctatgcgtgcaatcataggtgacaagctagtggacttaggatatcaaccaggcatccaaccttatacagaaggtgtctttgtgaaagcacccgtatttagctttaacaaattgaaaaacgtcgacatcacgttaggacctgaaatgaagtcaacaggtgaagtgatgggtaaagatgcaactatggaaaaagcactgtttaaaggtttaacagctagtgggatggaagttaaagatcatggtacggtcttgatgacagtcagcgataaagataaagatgaaattgtctctattgcacaacgattaaatgaagtaggatatagaatcttagcaacacaaggtactgcacgaaaattagccgagaataatataccttcagaagtagtaggaaaaattggtggcgaagatgatttacttacgcgtatacaaaatggagaagtacaaatcgttgtgaatacgatgaccaaaggtaaagaattcgaacgagatggtttccaaattagacgcgcctccgtagaaaatggcgtgccttgtctaacctcattagatacggttgttgcattaacacgtgtaattgaaagcatgacatttacaatgaaaaatatgtagtaatgaataagtgagaaatgtcacagcaatgaacaatcattgactttgtgatggattagataagatgaaataaaaaaggttaggatgtagagctagatgaaaaacttgccaattattgctttagattttgattcaacagaagctgtagatcagtttttagaccaatttaatgaaccactattcgtgaaaattggaatggaactcttttatcaaactggacctcaactgattgcttcaataaaggatagaggacatgacatttttcttgatttaaaattgcatgatattcctaatacggttggcaaagcaatggaaggcttaagcaaattaaatatcgatcttgtgaatgtgcatgcggcaggtggtacagaaatgatgaaacaagccttgaacggtttgcaaaaacacaaccccgatattaaattaattgcagttactcaattgacgtcaacaactgaaacgatgttgcacaaggaacaaaacattcaaacttcaattgaggaggctgttttgaactatgcaactttagcacaatcatcaggtttggatggcatcgtatgttcaccactagaagcagaattagtgaaaaatgaattaggtaatgactttttaaaggtaacacctggtatcagaccaaaagatgctagttcagacgaccaaaaacgtattacaacaccagaagatgctaaagaattaggttcaacacatattgttgttggaagaccaatcaccaaaagtgaaaacccagtagcaagttatcataaaatcaaagaaagttggttaggttaatatggctaaagcaattgcaaaagcattattagaaattgaagcagtatcactatccccgaatgatccatttacttggagttctggtataaaatcaccaatttattgtgataatcgtgtaacacttggatatccagaagtacgtcaacatatcagagatggactgtgtgacttaatcgaaacatattttggagacgtggaaatagtttcaggtactgccacagctggtataccccatgctgcgtatgtttctgaaaaattagctttaccgatgaattatgttcgttctaaaagtaagagtcatggcaaacaaaatcaaattgaaggtgctttaagtaaaggaaaaaaagtagttgttattgaagatttaatttcaacgggtggttcatcaattactgcagtcgaagctttaagagaagcgggggcagatgttattggtgtcgtagctatctttacttacggtttaaaaaaagcagatgaacaattcaaacaagcgcaaatgccattttatacattaagcaattacaatgaattaattgatgttgcaaaagaaaatggagaaatttctgataatgatattaggtctttagttgattggagagacaacttgtcataatatactaagtggaggggatgttatgacaaaagacccgaaagaagcttataatcatttcgcacatttgaataaatttttgaataaaaatgaagattatagagaccaaaacatatcagatattgattacgaaatgttaaagcaaaaatcagaagaaaatatatataaaaaatctaaatcaactataaagcaaaaagggcatattaaataataagcttaacaaatagacgatttaagttaataacatggcaaataagtaggggctaatcaaatttattttattaaataagtttgattagcccctatttgaaataagaaagggaacaacatttatattgattatcatgaattgttgatttcaattataggtgccccgtacgttataaattttttaatagtgtattagcgaatcattattttaatgatgatatagcctacaagtaatacaagggctgcaataagtaaaggaataatataaaaagacatgaacattacctccaatgtaatttagtttcattttaactatagaagttaaaatggtaaaagaaaaagctattagtttaagtataacagttaataagtatattcatatgatatgcttagtttactaaaaaagataattaaagtatcaaatgatttataaactatgtatttaagatctatatacttattttaaaataaattgtaaaaataagatattaaagctttgatattttggtaagggggacttgtatgcaaaaaattcgacagttacttaaaaacaatacaaaagatatgatcatttgtcttattggttcttttattagtgctattgcagtcaattgctttatactagggtcaaatttaggtgatggtggcaccgtcggcatgtcattagcgcttaaatacgctttcggttggtcaccagcactttcatctttaattattaataccctcgtcattattgttggctggaaatttttaagcacaagaacagcgatttatactgtggtcgccaatacttccatttctatatttttagatttaactgaacattggaagacaggggtagataattttgtaattaatgcaacgtttggtggtgtactagtcggtgtgggcattgggttagttattgcatccggtggtgttataggtggtacatcagttattgcaaaaatgcttaataagtattttgatattaaaacagcacagggtatttttgtattagatggtttagtcgtactatcatttttatttgtattgccactcacgaacgtgctatttacaataataatgattttcattactgagcgtgcgacctcatttataattgaaggttttaatcccaaaaaggcagttacagtcatttctagtaaaaacgaaacgattagtgataaaatcaacagcttcacaggtagaggctctacgatactaaacggtaaaggtggttatggtaaacatgagacaagcatgttatacgttgttgtgccacaatcacaagtaacaagagttaaaaagttagtaaatgaagaagacgaaaatgcatttttagtgattcatgacgtacgtgacgtacttggtaatggatttattaacttatcttaaatttagaaatttacgaacataaaatgcataaattcgatttttgatagtatatcctttattctaaagtgtataaacgtttaggaggtagaataatggcaatacctaagataacaacttttctgatgtttaacggcaatgcagaagaagctattaatttatatgttaatacatttgaggacgctgaaatattagcgttggtaagatatagcgaaagtgatgaagaaccaacaggcgctgttcaacatgccatttttagattaaaaaatcaagtatttatggcaattgataatatgaatggggtagatattgagatgaaccctgcaatgtcattatacgtgacagttgatagcgcaattgaaatggagagattatttagtaaactgaaaagtggtggcgccattttaatgccaaaaacagaaatgccaccttttagagaatttgcatggattcaagataagtttggtgttaatttccaattagccttacctgagaaaaattaaatactaatatagaagcgggacgatgaaatcaacatttctaaaattgatttcatcgtcccgcttttgtttgttataggatacaaccgtaatattatatcgtatttactttactttcattttttgaatgtgatcataatcgggtgttgcataaagtgttttttggttatcataagttacaaaacctggttttgcacctgaaggcttatgcacgtgtttaatttcagtaaagtcaactggaatttgagctgaactacctgcttttgagaagtaaccagataacatggccgcttctttaattgtttcttcactcggatcatcacttaatatgacgacatgtgatccgggaatatctttcgtatggaaccaaagttgatgtttcttagctaatttattcgttaaataatcattttgtttattgtttttaccaaccatgattgtatctccatctgtagatacgtattcttgtaactgcatagtttgtttctttttcttcttactctgtttacgttgtttcatatacccttgctcggctaattcatcgcgaatgtcatcaatatcattgactgaaatatgagcaagttgttgttctatactttcaaaataattaatgttttctttggttaaatcgatttgatggtgcaattcatgttctcttgtctttaatttattatattgtttgtaataattttgtgcattcactgctggtgcctttgtagggttaagcggtatagtgacttcttcaccagtgtaataatttaaggctgtgaccgatttgtcaccttgtttaatacgataaatgttagcagtgataagttccccatacaattgttgtaattctttttcttttgtaccttcttgttcatcaatcaatttatttaatttattttgaaatttatgcaattgttgttgtacaaatttcactaaatcatttgcacgttgttttacacgctctcgctctccacgtgcatcataataacggtctaataaatcatgtaatgagtcatattctgttacatcatcataaaattgatttaatttcataaagtaaaaatcttctttacccgtctcgtgatttttatgaaaaacgggtgtaggtgtatggttaatttcattgatgacttcatcaaatgcttctggtaacgtatcatttgtcataaatcgtttgcgattcacaatttcatttgtaattaatggactaaagccttcgaaatgatcaagaagttgacgtgcaattttgcccttattgaaatcgatatattgtatgactttattaccagttatttcaaaaggattaattttattttgagttggtggtgtttcatattgaaagccaggcattactgtgcgatattgattggtattcggtgttaaatgcttaaagccttcaatgattttacgctgatcatcaactaatattaagttactgtgtttacccataatttctaaaattatagttctatatattgtatctccaatttcatctttgctttgaacatcaatttctacacgtctatcattcccaatttgtcttactgctttaacgatgccaccttctatatgtttacggaaaacgcgtgcaaacatgggtggatcaaatggattatcatattttttatttgttaaatgcattctagcaaagctaggatgaatagaaagtagaagttgatgattttttcggttttgtcgaataacgacaagaagcgtgtcgttttctggttgatttattttatggattcttccgtctacaagaaattgtaacgattccaccatttttcttgtaaataaaccatcatatgccattactatcagccaccttatttttagtcattcatcatattgtaacatggcataaagaaatggtcatgaccaaagtttgtgctgttggacgctatacaactaaatgaaaattgtggtatcatagtttaataatagaagaatagtttagagaggtagtaagtcatggataatgagaaaggtttgttgattgtactatctggaccttctggcgttgggaaaggtacagttagaaagaaaatatttgatgacccatccacatcttataaatattctatttcgatgacgacacgtgataagcgtcagggtgaagtcgatggtgttgattatttcttcaaagcaaaatcagagtttgaagagttaataaaacaagatcaatttatagaatatgcagagtacgtaggaaattattatgggacgcctgtgcaatacgttaaagacactatggatcgtgggcacgatgtatttttagaaattgaagtagaaggtgcaaaacaggtacgtaaaaagttcccagatgcattgtttatttttcttgcgccaccaagtttagatcatttacgtgagcgcttagtaggtcgtggtacagaatccagtgaaaaaattcaaagccgagtgcatgaagctcgtaaagaagtggaaatgatgaatttatatgattatgttgtagttaatgacgaagttgagttagctaagcaacgtattcaatctattgttgaagctgaacatttgaagagagaacgtatagaagcaaaatatagaaaaatgatactggaggcaaaaaaataatgttacaaccaccattaaaccaattaacatcaaaaattaattcaaaatatttaattgcaactacagctgcaaaacgtgcgcgtgaaatagacgagaaacctgaaagtgcattattaacaaaatacatttcagaaaaacctgttggtaaagctttagaagaaattgctgacggtgaagttttcccagacgaactattcttaaaaacgtattaattaaaaagcatagatattgaattttatatagccatctatgtgttattaaatgaatatctttcaagtgcacaccatgcagtcgcaaggtgtgctttttttatttaactaataaattgtgtataatgaacagtaatcgaaaagttattttaattatgagggacatacattttgattttcaattataagagacgtcacccacgtctgatctaattcaatcgaaggagaatgactatataatgaaacgaatattacttgctgttacaggtggtatagctgcatataaagcaattgatttaacgagtaaactgacgcaggctggatttgatgtcagagtcatgcttactgatcatgctcaggaatttgttaccccactagcattccaagctattgggagaaatcccgtttatacgagtacatttatagagcaaaatcctcaagaaattcaacatgttgcgctgggtgattgggcagacgcaattatcgtagcgccagcaactgcaaatacaattgctaaattagcaaatggcattgcagatgatatggttacgtcaacgttgttagcaactgaaacgcctaaatttattgcacctgcaatgaacgtgcatatgtatgaaaataagaggacacaacataatttagcgactttaagttcagatggttactattttttagaacctggagaaggttttttagcatgtggatatgtagcgaaggggcgtatggaagaacctttacaaattgtagagcgcataaagcaatactttaatgacataaaacaaaaagctgtgccagcatcaagtagctttattggtaaacatgtattaattactgctggacccactgtagaagaattagatccagttcgttttttatcaaatcgatcttcaggtaagattggatacgtgcttgctgaatctttagctaaacgaggtgcagaagttactttagtttcaggaccgacacatttaacaccaccgaagcatgttgatgtagtacacgtacaaagtgcagaagaaatgttcgaagcggttcgaagtcgttttgctaaacaagatatcgtttttaaagctgctgccgtgtcagattatgcgccagtagaaatgttggaccataaattaaaaaaacaagatggtactttatctgtagaatttaaacgtacaccagatattttgaaatatttaggagaacataaagaatcacaatacttagttggatttgcagcagaaacacaaaatattgaagcttatgcacaaaaaaaattgcataataaaaatgcagatgtgattattgcgaataatgttggagaccgtacgattggctttagttccgatgacaatgattatacgatgtattataaaaatggagacgctatacctttaggcaaacacaaaaaagtcgaattagcggagcatatattgaatagtttagaaacaaggtggcaataaaatgatagcaaaagtaattgttgatataccttctaagagtgttgattttacatttgattatataattcctataaggttacaatcaatgattcaaataggtatgcgtgtcattgttccatttggaccaagaacaattcaaggttatgtcatgaagataacagaccagcctgatagcaatatagatataaataaattaaaagaaattaaagaaattcaagatataaaacccgaattgactgaagaattaattcaatttactgagtggtataacaattacttcgttacaaaacgtatttcaatgcttgaagttatgctgccaagtgcaattaaagcaaaatataccaaggtcttttctattgaagatacgaatgcactgcctgaaactttagcagggaaatttgactcatcaggacactatgcatttaaagcagcacagcaaaatgatgatttaacacaaattgcgccattattaaaacaaggtattgtatctgaagtaaccttactatcacaaaatgtaaataagaaaaaacaacgtgccatatgtgttgttgaaggatttaactatgatagtgtgctaaattcattagaaaaatctaagaagcaatatgaattatatgcctttttattagatgaacaacatcgcatcgttttacttaaagacatagaagcaatgggttattcaaaatctagtgtagatacattaattcgcaagggctttgttgaaaaatatgatgctgtcgttgaacgtgatccatttgagactagggtctttgaacaagatgtgaaacaacatctgacttcagaccaacaacgtgcatttgaagccatatcagaaaagatacatgctcatgaacaatgtacctatttattgcatggtgtgacaggatcaggcaaaacagaagtgtatttacaaacaattgaagaagtactaaatcttaatagacaagcaatgatgttagttccagaaattgccttaacaccacaaatggtattaagatttaaacgtagatttggagacgaagttgctgtactacattctggattatccaaaggtgaacgctatgatgaatggcaaaagattagagacggtaaagcacgtgtgagcgtaggtgcacgttcaagcgtctttgcaccatttaaaaatttagggatgattattatagatgaagaacatgaatcttcgtataagcaagaagattatcctagatatcatgcaagagatatcgcgcaatggcgtagtgagtatcatcaatgtcctttaatattaggcagcgcgacaccaagtttagaatcatttgcacgagctgaaaagggtgtatatgagttactatcgttacctaacagagttaatcaacaagctttacctgaggtagaaattgtagatatgagagaagaattgaactctggaaatcgctctatgttctctaatcaattacgagatgcaatacaacaacgcttagataatcaggaacaaattgtactctttttaaatcgacgcggttatgcttcatttatgttgtgtagagattgtgggcatgttccacagtgtccgaactgtgatatttcattgacttatcacaaatcaacagatcaattgaaatgtcattattgtggtcatcaagaagtaccacctaatcaatgtcctaattgtgaaagtgagcatattagacaaatgggtactggcacacagagagttgaagaacttttacaagaagcgtttcaagaggctcgtattatacggatggacgtggatactacttctagaaaaggtgctcatgaaaagttattaaatgattttggttcaggaaaaggggatatcttgttagggacacaaatgattgctaaaggattggattttcctaatattacgttagtaggtgttttgaatgctgacacaatgttgaatttgccagactttagagcaagtgagcgaacataccaattgttaacgcaagttgctggtcgagctggtcgtcatgaaaaagaaggacaggtgcttattcaaacatacaatccagatcattatgctattaaagatgtccaagaaaatgattacacagcctttttccaaaaagaaatgaattataggaaaattggaaagtacccaccgtatttctttttaattaattttactattgcgcataaagaaatgaaaaaagttatggaagcatccaagcatattcataaaatattactgcaacatttaacagacaaagcacttgtacttggcccatctccggccgcattatcaagaatcaataacgaatatcgctttcaaatattagtgaaatataaacgagaacctgcattacacgaagcattaaaatatttagacgattattatcatgatcaatatttaaaagaaaaattatctttgaaaatagatatcgcaccgcagatgatgatgtaatattgagcacgttatataacgaagctaatgtatactgacttttgtataaaaatattagaaaaaagaacaaattgttttgctaggtaaatgattagccattaaaatagtttgttctttttttggacaaaaaaacataaaagttagatataaatatgaagtatagtgatggcgctatggatataatcttaacaattaactaatatttattaaaatttataaaaaataatttgctacattttttgcatttaatattaattaaagttatattaaagagtaacgagtcacgcataaatgattagagtacgtattgagaacgacaataacgattaagaaaagcaaccgactaagtgagaaatgagatcaatatctttttatgtctaatctaaggagtacgcctatgagtttaattcgaaatagaaaagcaattggattaagtatcaatgagttgtcaaacagaattacgtccttttacgatatcgtattaaatccagagatgattaagcaaattgaacaacaacaattaacactcaatcaaaatgacgctaaaatattagctgaatttttaatacgactgcggaagatttactttagtatagtaacgttagtttatgctttagggaaaaaaggagtgttcatgtgcgatataatgagtttaagcaacccattggtgaagaacaaaatgagtttaaacaagctcatttacccaatgtgaaagttttagaagggcaatattgcagattagaaaagttagcgcaatgtcatattcaagatttatttaattatttttctgatgaagcggatgcgccgaattggacatatttacctgatgagcaacctcacgattttcaagcatttgaaaattatatagataagaaaatcaattctactgatccgtattttttcgccattattgataaagaaacatctgaagcagtgggcattttatctttactcagaattgatcgccataatggttcaattgaagttggtcatatacattacgctaatgtcataaaacaaacacgtattgccacggaagtgcaatttttattagccaattatgtatttcaaacattaggttatagaagatatgaatggaaatgtgatgctttaaatgaaccgtctattaaagctgcccaacggctagggtttaaatttgaaggtatttttagaaatcataaagtgtataaaaatcgtaatcgtgacacatattggttagcaatgattgataaagagtggcagcaaaataaacttaaatttgaaagttggttagcagcacaaaatttcgatgaacttggtaatcaagtgaatcggttaacgattctagattgatgaaaaacaataagcttaaagaacgatcaatgctcaatatataatgaaaaatgtaaaggtttgaaatatgtcttgtatactatgaacatcgttttaaagtgcagtatagataaaaagcccatttaaatatgagcagatatctatttctgcactttttatattttatgaagatagattgaatgaagacttatcctactacttactcaatatgttcagtaaagtattctttcaatgaatggtgcaatttccactaaaataagttataataatatgatgaatttttatgaggagaaatcgatatgacaatcaaacaacttgtaacaagcaaacaccctattcttaataagtctataccggatgtgacaaaatttgatgaaaatttagaacaattattgttagatttagaagatacaatgtatgatgttgaagcatctgcgatatgtgcgccgcagataggtgttgcacaaaaagtagcgatgatagatatggaaatggatggattgttacaactgattaatcctcaaattataagtgaatcggatacaaaagtgactgatttagaagggtctatcagtatacctaatgtttatggtgaagtggaaagaagtaaaatgattgtcgttaagagtaatgataaaaaaggtaatgaagttgagatgactgcatatgatgatatcgcgagaatgattttacatatgatagatcattttgaaggaagattgtttactgaacgtgtagagaaatttttaagtgaaagtgaaatggaggcgtattttgataatgagtaaagtcatttttatgggaacaccagatttttcaacaaaagtgctagaaatgttaattgctgaacatgatgtgattgcagtagtcacgcaaccagacagaccagtaggtagaaaacgtgttttaacacctccaccagtgaaagaagttgcaattaagcacggtttaccagtatatcaaccagaaaaattagcccaatcatcagagttagaacaacttattgacttagaagcagatttaatcgtaactgcagcctttgggcaaatattgcctgaatcattattaaatgcgccaaagttaggggcaatcaatgtccacgcgtcgttattacctaaatatagaggtggagcgccgattcatcaagctatcatggatggtcaaacagaaacaggtatttctataatgtatatggttaagaaattagatgcaggagatatcatttctcaacaagcaatagaaattgagcaccaagatgatgtcggtaccatgcatgataaattgagctttttaggtgcagaattattaaaagagactttaccttctattattaatggtacaaataaccgcattacacagaatgaaagtgaagctagttttgctactaatataagtagagaacaggaaaagattgattggtaccaatcggctgaagttatttacaaccatataagaggtctgtcaccatggccagtagcttatacagttatggatgatgataacatgaaagtatatgcatcccgaattgaaaaaggtaaaacaggtgaaccaggtacaattattgaaacaacgaaaaaagcaatcatcgttgcgacaggttccgacgatgcaattgcattaacagatattcaagttgcagggaaaaaacgtatgttaactgcaaactacttaagtggcgtgcaaacttcacttgttgggaaggtactaacatgacaatagaaacaaatgtgcgagcgttagcatttgaaaccattcaagatattataaatgataaagcctatagtaacatcatcattaatgatgtgttatcaaataatgaattaaatagagcagataaaggattatatacagaattagtatatggcacgttaaaaagaaaatatactttagattatttgctgaaaccttttgttcaaacaaagttaaaaggttgggtcagacagttactttggatgagtatttatcaatatgtctatttagataaaatacctgaacacgcgattattaatgaagccgttgaaattgctaaatataaaggcggtccgcataatggtaatgttgtgaacggtatactaagaaatattatgcgcagtgacttaccagattttactgaaattacagatgacaaaaaacgtatcgcgattgaatacagtttacccaaatggttggttgatcactggacaacgcattttggtattgaaaaaacagaaacaattgcgcaatcatttttagataaagtaactacaaccgtacgtgttaacttaactcgtatttcagtagacgatgctattagaagactcactgatgattatattgtagaacaagatagagaaatcgaaacttgtctacatattagtggtaagccaattattgaatctcgtatgtttaaagatggactgatatctattcaagataagagttcaatgtttattggtgaattaatggcattaaaagaaggtgaccaagttttagatgcttgtagtgcacctggtggaaaagcttgtcatattgctgaaatattaaatggtactggacatgttgatgcgacggacattcatgaacataaaatagatttaatagattttaatataagaaaattacgtttatctaacatttctgcatttgaacacgatgcaactgaaaaatatgataaagtgtatgataagattttagtagatgcgccatgtagtggtttaggtgttttaagacataaaccagaaataaaatatgaacaatcgcaacatgcaattgaatctttggttgaaattcaattggaaatcttaaataatgtgaaatataatgtgaaacctggtggtacaatgatttattcaacttgtacgattgagcaaatggaaaatgaaaatgttgtatatacatttttaaaagaaaataaagattttgaattcgatcaatttgaacatccaataactggagaaaaagtaaaaacgatgcaaattttacctcaagattttaactctgatggctttttcataactaggataagaagaaaggaaaattaaaatatgataactgcagaaaagaagaaaaaaaataagtttcttcccaattttgaaaagcaatcaatttattcattaagatacgatgagatgcaagattggttggtacaaaatggtcagcaaaaattcagagcgaaacaaatttttgagtggctttacgaaaaacgcgtcgatgacattgatgatatgacaaatttatctaaagaattaagagaagtacttaaagataattttacaatgacaaccatgacaacagttgtaaaacaagaaagtaaagacggtacaattaagtttttatttgaattacaagatggttatacaattgaaacggtccttatgagacatgaatacgggaattctgtttgtgtaaccacacaggttggttgccgtattggttgtacgttttgcgcttctacattaggcggtttaaaacgtaacttagaagctggagaaattgtttctcaagtattaacagttcaaaaagctttagatgaaacagaagagcgtgtatcacaaatcgttatcatgggtattggagaaccatttgaaaactatgatgaaatgatggatttcttaaaaattgttaatgatgataatggactaaatattggagcgcgtcatattacagtgtcaacttcaggaattattccaagaatatacgatttcgctgatgaagatattcaaattaattttgcggttagcttacacggtgcaaatgatgaaattcgatcacgtttgatgccgataaatagagcatataatgtagaaaaattaatggaagctattcattattatcaagaaaaaacaaatagacgtattacttttgagtatggtttatttggtggcgtcaacgaccaaattgaacatgctagggaattagcgcatttaattcaaaaattgaattgtcatgttaacttaataccagtgaatcacgtaccagaaagaaattatgtgaagacacctaaagaagatatctttaaatttgaaaaagaattgaagcgtttagggataaatgcaacaattagacgtgaacaaggtgctgatattgacgctgcttgtggtcaattaagagctaaggaacgaaaagtagaaacgaggtagggacatgctaaaagcacaattttttactgacacgggtcgataccgtgataaaaatgaagatgcaggtggcgtattttataatcgtacagagcaacagctattagtgctttgtgatggtatgggtggtcacctagcaggagaagttgcgagccaatttgtcactgatgagcttcaacgtcgttttgaagtggaaaatcttatcgaagctgatcaagctgaaaattggttgagaacaactttaaaagttattaatcgtgagttatatgaaatgtcagtagaaaacccagaatataagggcatgggtacaacttgtgtctgtgctttagtatttgataactatattgtagtagcaaatattggtgattcacgagcttatttagtgaatagtagagagattgaacaaattacgaatgatcattcgtttgttaatcatctcatgatgattgggcaaattactgctgaacaagcatttaatcatcctcaacgaaatatcattaccaaagtgatggggactgataagttagtgacgccagatatatttgtgaaaaaaacgaatttctatgattatttaatgttaaattctgatggtttaaccgattttgtacgtaaccatcaaattcaagaaacattggtacaagcgaaagaattagagacacacggtcaagacttaatagaacttgcactatctgaagatacgaatgacaatgtgagtattgtattggctgagattgaaggtgataaagtatgataggcaaaataataagtgagcgctacgaggtcattaaaaaactcggtggtggcggaatgagtactgtctatcttgccgaagacacaattctcaatcgtaaagtagcgatcaaaacaattaggattcctgttggtgagaaagaagaaactattaaacgtttcgaaagagaagtacataatttaacacaactatcacataaaaatatagtgaacgtgtttgatgttacggaagatgatgataatttctatttagtaatggaatatatagaaggaccgacattatctgaatacattcaaaaaaaccaacctttggataccacaacagcactcaactttaccaatcaaattattaatggaattaaacatgctcatgatactaaaatcgtacaccgtgatattaaaccacaaaatattttaatagataagcaccagactttgaagattttagattttggtattgcgaaagctctaagcgaaacaacaatgacacaaacgaaccatgtattaggtacagttcaatatttatcacccgaacaagcacgtggtgaatcgacagataatggtaccgatatttattcaattggtgttgtattatatgaaatgcttattggtaaaccaccgttttctggagaaacagcagtaagtattgcaattaagcatatccaagatcctatgcctaatattactgatgaacgctcggatgtacctcaagcactaagtaatgttgtactgaaagcaacggaaaaagataagacggtgcgttaccaatcagtaagagatatgcaaagtgatttagaaaatgtattgtctgaaaatcgtgagaatgaagcgaggtatcaatccgttgaggagaataccaagacaattcctataaataaatcagatattgtcaaccagacgagagatgaagataaaggaaaaaacataaaagaaacaatgcagattcctatcgtcaatcaacaacaatttcaatcaagtgaagaacatatttatgaggtaccacaaaaaaagcgtacaaagaaaaagaagtttttctatacacttataatcgtcttattgctgtttggtttatttggattcatggcaatgggtatgtttggaaataaatatttagaaacaccagatttatcaggtaagacagaaaaagaagcagaacatattttaaaagaaaataaattacaaatgggtaatatatcgcgtgaatatagtgataaatatccagagaataaaattataaaaacgacgcctgagaaagggggtcgtttagaacaacaaagtaaagttgacattgttctatctaaaggacctgaattgacggaaatgccaaatttatttggtatgacaaaatccgaagctttagataaattaaaagatttaggcatcaaagattcaaaagtgaaacaagcgtacacgaaacaaaatatcgctaaaggtttaattgaatcacaaaatgtgaatcctggagataaagtgaaagtgaatgatagtaatatagagcttactgaatctttagggacaaaacaagtttacgttgatgactatgagaataaagcttttaaaacggcaaaatcagagttagaggcaaaaggattcaaggtagttgtcactcaggaaactgaggacaagaaagttaaaaaagataatgttatcagccaatcaccaaaagatgaagaaatagacgaaggttcaacaattgaattcaccgtttcaaaaggcgctccaaaatctgatgatgataaagaagatgaggaaaaagacgctgacgataaagataaagatgacaaagaatctaaagatgatgaaccagcgactaaagattatacagaaacttatgaagttcaatatactggtaaagatgacgacagccaagaagtaaaagtgtttgtaagagacaaagatggcgaagggacatcaccttcacaaatatttaaaataaaagacaataaaaccattaaaataccgatgacaatagaaaaaggtaaaacggctggttataccgttcgtgtagatggtaaagttgttgctgataaagatataccttatgatttttagcgacacttagcgagcgaagagagcatagtgtcgcttatgcaagagcgaaagctctagcgaaccacaaatagaagatataaaatgagcaccaatttagtcgaatttggattaaattggtgcttttaatttattatctcaatttcattcatagaataattaagtggaaaagtatcgttatcgatatttacaactgaaaatttagccgaaatcgtttcaaatcatatttaaatcaaaaatgctttgctataatataaatggtaaaagtatttaaaagaggggtgcctaagtgaaaacaggacgcatcataaaatcaatcagtggtgtttaccgagttgatgtagacggtgaaatgtatgatacaaaaccacgtggcctttttagaaaaaataaattttcacctattgtaggtgatgtcgttgattttgaagtagaaaatgtaacggaaggttatatacatcatgtacatgaacgaaaaaatgaaataaagcgaccgcctgttagtaatgtcgaccatctcattattgtaatgagtgctgtagaaccagatttttctacacagttactagataggtttttagtaattgcgcattcttatcatatgcgtccgcgtattcttgtaactaaaaaagatttgacatctttggaaaaacaacacgatattgaaaaattgctagaagtttatgagaatatgagctataaaacacaattcataagtattaatgaagatattgaacaagtcttttcaagttggggtgatggtttagctgtgttgagtggtcaatcaggtgttggtaaatcaacgttattgaataaatattttcctaatatagagattgaaacacaacacatttctaaagcgttaaatcgtggtcgtcatacaacacgtcatgttgaattgtttgagagagctaaaggctttatagcagatacgccaggctttagtgctgtggattatgatcatatacaaaaagatgaaatcaaaaattatttcatggaaatacatgaatatggtgcgacatgtaagttcagagattgtaaccatattaatgaaccgaaatgtaatgttaaagctgaattggaaaatggcaatattgcccagtttagatacgatcattatttacagctatttaaagaaatttcaaatagaaaggaaagatattaagtggcaaaattatatccatcattattatcagcagattttttgaatttacaacaagagttaactgctttagaaaaggcaggcgttgatggggtacattttgacgtcatggatggacaatttgtacctaacatttcaatcggactacctatattggattcagtacgtaaaggtacagatttacctattgatgtgcatcttatgatagaagaacctgaaaaatatgttgaattatttgctgagcatggcgctgatatgatttcagtacatgttgaagcaacaccccatattcacagagtgattgaacaaattaagaataaaaatgtaaaagctggtgtggtgattaatcctgggacgccagttgattcaattcgtccggtattaaaaatggtagattatgtattggttatgacagtaaaccctggttttggtggtcaaacatttataaatgattgcgtagaaaaactggatcaattatctgaaatcaaaaaagcgcaaggcttaaactttgatattgaagtagatggtggtattaacaataacactgttgaaactgtagttaaccatggtgcgacaatgttagttgcagggtcatacttttttaaacacgatgattatcaaacggtaactaacacattgaaaggttgacatagatgaaagccaatttattatgtggcaatagaaatttgcccaagcatattttagtggaacataaacatgaacattggattggtatagatagaggcaccttgatcttgctagaatctgggattacacctcaatttgcagtcggtgatttcgattctatttctgattcagagaggaactttatacaacaacagatagagataaatccttataattctgaaaaagatgacacagatttagctttaggtattgatcaagcagtaaagcgtggctatcgaaatattgatgtttatggtgcgacgggcggtagactagatcatttcatgggcgccttacaaatactggaaaaaccggaatatacaaaaatgaatatcaacattaaattaatagatgatacaaatgaaattcaatttatacaaaaaggtcagtttaatgtgacgtatagtgaacaatttccatatatttcatttataccagtcatctatccaactgtaatttcattgaaaggctttaaatataacttacaaaatgaaacactgaaacttggttcaacgcttactatttcaaatgaattaagtcaatcttgtgggaatatagaaataattgaaggcagtgtattgatgattcgaagtaaagattaaatgaggatttttaaatatacgctgatatctaaaagaaaatgaaataaaaaaagaccaatcctccacataaggattagtcttttcgtgcattatatttattaaactctagttactttaccagattttaaagcacgtgcagaaacccaaacttttttaggttttccgtctacaagaattctaactttttgaaggttagcattccatcttcttttagaagaatttaaagcgtgagaacgattgtttccagttgaagctttacgacctgttacgaaacattgtttgcccatgaaagtacctcctttaataaatataaatacacgtatctactacatactcgaataatgtaccacaaataagtatagatagcaataaaacgagaaaaatttttcgtttacatgagtaatacttttgttaatattaaattatggtataattgtaaactgtggataaatatagtattttttttaataagataatcaaaacgcattgtttattattgacgattatgatataaccataaacttaggaggcccattttatgacattagaaatcacaaatgattacggtagtatagacatttcaaacgaagtaatatcttcagttgtgggtagtaaagcagtagaatgttatggaattgtaggcatggcttctagacaacaagttagagatggcattgcagaaatactcggacatgaaaattatgctaaaggtatcattgtacgagaagataatggcgttgttgacgtagatatgtacattattgtaagctttggaacaaaaatatctgaagtagctagcaatgtacaatcaacagtaaaatatacattagaacaaacattaaaaataaaagtaaattcaatcaatatatttgtacaaggtgtgcgcattaataatggcacgaaaaactaggaggacattacgcaatggtaagcaaaatagatggtaaattatttgccgagatgattatacaaggggcgcaaaatttatcaaatcatgcagacttagttgattcattgaacgtttatccagtaccagatggagatactgggacgaatatgaatttgacgatgacatcagggagagaagcagtcgaaaacaatttatctcaacaaattggtgaactaggtaagacattttctaaaggtttattgatgggtgctagagggaactctggtgtgattttgtcacaattatttagagggtttagtaaaagtttagaaacatatgaaacaattaatgctaaacaatttgctgaaagttttaaagcaggtgtagatacagcgtataaagcaatcatgaaaccagttgagggaacgattttaacagtagcaagagatgcagctgatgcagctatacaaaaggcagaagaaaccgacgattgtattgaattaatggcttacattctcgaagaagcagaagtctcacttgaaaacacaccgaatttattaccagtattaaaagaagtcggtgttgtagatagtggaggtaaaggcttagctattgtttacgctggatttttaaaagcattaaaaggtgaaacggtatctgcacagtcaccaaaattaaataaagagtctttagttaatgaagaacatgattttcatggcgtaattaatacggaagatatcgtttatggctattgtactgaaatgatggttcgttttggaaaaaataaaaaaacctttgatgagcagaattttagagaagacatgagccagtttggggattctttattagttatcaacgatgaggaaattgttaaagtgcatgtgcatacagaaaaaccaggtgacgtatttaactatggtcaacagtatggtgaattaattaagttaaaagtcgaaaatatgcgtgaacaacatcgtgaagttgtgaaaaaagaacatgacggtggcaaagcaatatctacagaagaaacgcaagcagtcgacactgcagtcattgcaatctccatgggtgaaggtatttcagagattttcaagtcaatgggtgcgacacacatgattagtggtggacaaacaatgaatccatcaacagaagatattgtcaagattattgaacaatcacaatgtaaacgtgcaatcattttacctaataataaaaacattctaatggctagtgaacaagctgctgaaattgtagaagctgatactatagtcattccgaccaaatcaataccacaaggcattgctgcgttatttaattacgatgaaactgattcactcgaatctaataaatcaagaatggtggaatctttagaagcagtacgttctggttcagtgacatacgctgtgagagatactaaaattgatggtgttgaaattaaaaaagacgcatttatgggcttgattgaggataaaattgtaacaagtcatgctgatcaatttgaaacggttaagggattaatggcagaaatgattaatgaagatagtgaaatcattacgatgatcgttggtatggatgctgataaaacagttacttcagacattgaagattggatggaagcaacatatccagacgttgaattagaacaacatgatggtcaacaacctgtttatcaatatttgttttctgtagaataatataaatcacagcattagaatcttaaaagagtatcatttatacaatagtatatgacttcaaaaggaaaaacatcgactatatcagtcatgttacagatgggagtgagaaaatcagattttaaaatttgattaattcttacttccatatttttttgaaataatgacattttttaaatggttttaaggttgtcagcaatttaattttgcatttaataagaacaatacaaccagttttggtttataatgtttattgaacttgttataataaacaagatgtttaagaatgaaagcgcaacactttagaaacattaaaaataagagtggggtataattatgaaatataaaacagtcttcgatataattggtcctacaatggtaggcccttcgtcttctcatactgcaggcgcagtgagaataggtttagtagctagagacttatttaatcaattaccgaaacaagctgatatatatctttatggttcatttatggaaacatataaaggacatggcactgatgttgctttagtcggtggcttgttaggctacgatactgatgatgatcgtatacaaacaagtttggaaactgctgaggaagctgggatgaaagtcaactttattgaaatggcagaagaaagatcacatccgaacacggctattattaatatgcgtgatggagacaaagaaatatccgttgagggtgtttcaattggtggcggaaaaattgaagtagtagcaatcaatggattcaatatcgcgattagtggtaattacccggcattacttgtattccataaagatacgtttggtactattggtcgtgtagccaatatactgggagactcaagtattaatgtaggtagtatgcaagtatctaggaaagaaaaaggcgatcaagcattaatgacttgtgaattagatgatgcagtgaatgatgaaacaatagagaaaattaaaaacgtcgatggtgtagtgacggtttcactcatgggagacgcctaatggaggtattgcatgtttaaaagtgtgaaagaattagtagaaatgtgtgaagagcaaaataaaaaaatccatgaaattatgcttgaacaagaaatggaagttacaggactatctgaagcagatgtttatgcacatatggacaaaaacttacaaacgatggagaatgctttagacgaaggtttagcaggggttacatctacaacagggctcactggtggagatgctgtactaattaaagaatatttgaaaacggggaaatcactcgcaggaccaactttgttagacgcagttagtaaagctgttgcgacaaatgaagtcaatgcagctatggggaaaatttgtgcaacacctacagcaggttctgcaggtgttgtaccaggcgtgttatttggtcttaaaccgcgtttagaaccatcaagaaaagatatgttaaatttcttattaacttcaggtgcatttggttttgttgttgccaataatgcatctatttcaggtgctgctggtggttgtcaagcagaagtcggttcagctgcggcgatggcagctggagcaactgtagaacttgcaggtggaacgccgcaacagtcagctgaagcttttgcaatttgtttgaaaaatatgctaggtttagtatgtgatccagtagctggtttagtagaagtaccttgtgttaagagaaatgctgcaggtgcatcaaacgcaatcgtatctgcggacatggctttggcaggtgtgacttcaagaattcctacagatgaagtgattgaagcaatgtataaaatcggtcaaacgatgccatccgctctacgtgaaacaggtcgtggaggtttagcaggtacacctacgggtcagcgcctaaaacaagaaatatttggtgattaattatgtcaaaagtcaatttaattgaaagtccatttccattatctcaaataaaaggattaggtcggaaacgcttagcagtattgaatgaattaaatattcatactgttgaagatttaattctatatttaccaacacgttacgaagataatactgtaattgacttaaatgaagctgaagatcaagcgatagtgacagtggtgggtgaagtttattcaacaccaactgtcgctttttttggtcgtaataaatctaaattaacagtacatatcatggtcgaccaaattgctgtgaaatgcacatttttcaatcagccttatttaaaaaagaaaatagaattacatggaaccgtaacagtcaaaggaaaatggaatagagcaaagcaagaaatcaacggtaacagaatgttttttagccaacaaatggatgagagcggacaatatgaacctgtatatcgcattaaagaaggtattaaacaaaagcctttaagagatatgattagacaggtactagatcaggtgacgattcaagaatggctctctgaagacttaagaaaaaaatacaaattagaaactttagaagatacaattaaagctttgcattttgcaactgataaagcatctttactgaaagcacgtagaacatatgctttcacagaattatttatgtttgaattaagaatgcagtggttgaatcgtcttgaaaaaacatcagatgaagcaattgacgtagactatgatattaatttagttaaacattttatagatagtctaccgtttgaattaacagacgctcagaaacatagcgtgaatgaaatattcagagatttgaaagcacccattcgcatgcatcgtttattacaaggcgatgtaggttctggtaaaacagttgtcgctgctatttgtatgtatgccttgaaaacagcaggctatcagtcagctttaatggttccgacagaaatattagcggagcaacatgcagaaagtttagttgacctatttggtgatagaatgaacgtggctttattgactggctctgttaaaggcaaaaaacggaagctgttattagaacaactgaataataatgaaattgattgtatcattggaacacatgcattaattcaggatgatgttaagtttaataatgtgggtcttgttattacagatgaacaacatcgttttggtgttaatcagcgacagttgttaagagaaaaaggtgctatgaccaatgtcttatttatgacagcaacgccgataccaagaacattagccatttcagtattcggtgaaatggatgtttcttcaattaaacaattgcctaaaggtagaaaaccaatcatcacttcttggtctaagcatgaggcttatgaaagtgtattaaatcaaatgacttcagaactgaagaagggtagacaagcttatgtcatttgcccactgattgaaagttcagagcatcttgaagatgtacaaaatgttgttgaattatatgaatcattgcaatcatattatggagttgaaaaggttggtctgcttcatggtaaattacattcagatgagaaagatgaagtgatgcaacgatttagcaatcatgaaattgatatattagtgtcaacaacggtagttgaagtaggtgtgaacgtgccaaatgcgacgtttatgatgatatatgatgctgatcgttttggtttgtctacgttacatcaattgcgtggacgagtggggagaagtgaacaacaaagttactgtgtattaatcgcatcaccgaaaacagaaacaggtattgaacgtatgaatatcatgacccagactacagatggctttgaacttagtgaacgtgatttagaaatgagggggccaggcgatttctttggtgtaaagcagagcggtttacctgatttcttggttgcaaatgtagtggaagattataaaatgctagaagttgctagagatgaagccgccgaattaatacagtcgggtgtcttctttgaaccacaatataatatattaaaatcttttattgaagaaaatttattgtatatgagttttgattaaaaattgttggtttgtatttcatgcaaatccattgtatactttctattatattctaaataaaaatgacactcgtaaataatttaattatttacgaatgccatccgaagttagaatatgatttattgtgggagtctgttagataattaattatctaacaggctttttaatttacgccaacttctgtccaagccttatcaatagcgtcagcttcagcgctattatcaccataaagtttatttgcggcttcttttaaagctgttttagcatctgaaaattctgaattttgcgtcagatattgagttaatgcaaggtagtaaatttgttcagctttatcttttccaatttcattaattgtcagatatgcagccttgttaggaataccactatttgtgtgtacaccaccattatcctgactacctgattgatattgatccatgtgtgccggttgattatatctttcagggtcttttaagcttctaagaccatctccttcagttccagttgtatatacatcttcacccattaaccagtcatctggatctacaaaatacccaaatacatctgaaaatgattcattcaaagcgcctgattgatcttgatattttaagttagacgtacgctcagttacggcatgtgttaattcatgagcgatgatatcattggctcctgataatgctttgaaggtttgtccatcaccatcaccgtatatcatatattgccctgtccacgcagcattattgtaatctttatcatagtgtacgacagagtcaatctttcctccggcgttatcataactatcacgatgatgtttatctaaataatagttatacacttcattagcataataatgtgcatctacgccagccttgtgttcttccttgtcgaaattattactatcgtttgtgatttctgaaaaatcatctgtagtattattagcagtttgtgtatgcatttctgcattttgcgttgtatcttttaatgtgtattcaccattattctctgttaaattcaatggtgacttttcatcatcgttcacgcctgtaccttttcctgttgctgaggcatttttgatgacattttctttattcaatatttctccagtgctagcatcgacttgaattttccaatgagcggccttaggtgaaatatagtttaattcaacatcgtatacaagtttttgactgtcgctgttaatatctaatttgtttttatttacgatatcatagcctttgatattgttaacatctgccttgttttttcctatagctttaaatgcgctattttcagcatcaactgcagaaattttcacttcgttgtcaaccttgacagttggtttatcaatgctaccgtttattaaagtgacatcaccttgtttgtttacatgaacttttaatgcgctatcttcagcagttataccattgactttgggtttcaaggtataatgagtgattccagtagcgtcttgttgtttatctgtaatttcatattgctcaaatgcattatcttgaacattagcatttccagattctttagattccttgataatctttgatgcattattttgtaaatatgcttttacatcttgatcattatgaacttttgtatttatgggtttcttgagactttctggtttgatgctattgttttcttgcgcgtgtgcttgtaatgatgtgacagatatcagtgaacatgttaagagtgttgtggtaatcaatttcttcatcatgtaaccctcctaattattaatcttttggctttagaaacaattgcttttcatataaatatttatttacataaaatatcacacccctttaaattattttgaattatacgttccaaatatttttatttcaatagtgcactacaaataatcttttaattgttacatttgtaataaaatagtaatgttaaaagagtttttttgatactatataaaaaacttattattaaattgagctaatgctaaagcaaatttaatttagcgacagcatatgttttttgttgagcaaatgaaatagaaagtgttatgatatgttaggaatgtttaagacttggtactaaaaacatgggagtttgaatgcgatgaaattaaaaaaacaagaacgacgtaatgaaataaaaaatgaaatagagaaaaatccttttattactgacttagatttaagtgttttgttctcggtgagtattcaaacgattagacttgatcgtacacatttaaatattcctgagctaagaacacgcattaaaactgttgcaaaagaaaattacgaaagtattcgctctatagaaggtagtgaaattattggggatgtaatcaatgtacaacctgatcaaactgccacttcaattataagaatagacgaaaaatctgtgtttactagaaataaaattgctagaggacatgtattgttcgcacaagcaaactccctgtgtgtggcactgatacataaaccagttgttttaacaagagatagtaatgtaacatttataaaaacagtaaaattaaatgaaacggtacgtgctgatgcacaaactattgaaattagagataaattttatacgataaaagtgcgatcatatgtaaaagatacgctcgtttttaaaggaactttcaaaatgtattatacaagtgaggatgaacaaaatggttaaattagcgattgatatgatgggtggagatgatgcacctggaatcgttttggaagctgttgaaaaagcggttaatgattttaaagatttagaaataattttatttggagattcatcgcaatgtacattagaacatgatcgtgtagaagtgcgtcactgtacggaatctatcacgatggatgatgaaccagtaagagcaattaaacgtaaaaaagacagctctatggcgcgtatggctgaagcagttaagtcgggtgaagccgatggatgtgtttctgctggtaatactggcgcactgatgtctgctggactattcatcgttggtcgtattaaaggtgtagaacgacctgcattggttgttacgctaccgactgtatcaggtaaaggttttgtatttatggatgtaggtgctaatgctgatgcaaaagcagaacatttattgcaatatgctcagttgggtaatatttacgctcaaaaaattagaggtattgctgaaccatctgtaagcttgttaaatattggtacagaagcagcgaaaggtaatagtttaactaagaaagcataccgtttaatggaagatcaacatgattttaactttacaggtaatgtcgaagcgaaaggtttaatgaatgatgttgctgatgttgtagtcactgatggctatacaggtaatatgattcttaaaaatctagaaggtgttgcaaaagcaatgggtaaaatgtttaaatctacactgttaagtagttttaaaaataaaatggcagcactgattttacgcaaagacttgaacggtttaatgacaaaaatggattatgcagaatatggtggttcagtattgttaggattaaatggtacggtagtaaaagcacatggcagttcaagtgcaaaagcattctattctgcaattcgtcaggcaaaaattgctggtgaacaagaaattgtgaaaacaatgaaagaaacggtgggtacagaaaatgagtaaaacggcaattatctttccaggtcaaggttctcaaaaagttggtatggcgaatgatttatacgaacataatgaagcagcgactacaattttaaatcaagcccaaaacgctgtggattttgatattttagaaacgatgtttacagataaagaagcaaagttaggccaaacagaaaatacgcaaccagttttattaacgcatagttcagctttattaaacgcccttaatgatttaaatgcagattatactatgggacatagtctgggggaatatgtgagtttagttgcaagtggtgtattgaaatttgaagatgcagtaaaaattgtaagaaaacgtggtcaacttatggcagaagcctttccagatggtgtgggtagtatggcagccgtacttggactggattatgaagcggttgacgcaatttgtaaacagctttctacagagagtgaaattattgaaccagctaatatcaattcaccgggtcaaattgttgtatctggccataaatcattgattgatcagttagttgaagaagggaaatcgctaggtgctaaacgtgtaatgccattagcagtttcaggtccattccattcatcaatgatgcaagttatcaaagatgattttgcagattttattgaccagtttgagtggtctgatgctcaattcccggttgtacaaaatgtgcatgcacaaggtgaaacagatgcaaatgtaattaaagcgcatatgattgaacaattatattcaccagttcaatttattgattctacagagtggttaattgaacaaggtgttgataatttcatcgaaattggtcctggtaaagtactttcaggattaattagaaaaattaataaaaatgtaaaagttacctcaattcaaacattagaagatgtgaaaggttggaatgaaaatgactaaaagtgcattggttacaggtgcttcaagaggaataggacgcagtattgctatacaattagcggaagaaggctataaagttgcagtgaactatgctggaaataaagaaaaagcagacgctgttgtggaagaaatcaaagctaaaggcgttgaagcttttgcaattcaagcaaacgttgcaaatggtgacgaagttaaagcgatgattaaagaagtcgttagccaatttggttcagtagatgtgcttgttaataatgcaggtatcacacgcgataatttattaatgagaatgaaagaacaagaatgggacgatgtcattgatacaaatttaaaaggtgtatttaattgtattcaaaaagtaacaccacaaatgttaagacaaaagagtggctcaattattaacttatcaagtgtcgtgggtgcagtaggtaatcctggacaagctaactatgttgctacaaaagcgggtgtaattggattgactaaatcagcagctagagagttagcttctagaaatattacagtgaatgctgtagcacctggttttattgtttctgatatgacagatgctttaagtgaggaactcaaagcacaaatgttagaacaaattccattagctaaatttggtgaagattctgatatagccaatactgtagcgtttttagcttcagagaaggcaaaatatattactggacaaacgattcatgtcaatggcggcatgtacatgtaagtcgatttagaaaaaataatcatcgctacaagcttttaaacaatagtggtatgactgattatattttttaagtaaaatgtcattttggatgtctgacacatgcgtcatgatacggtataattgtcaaatttagtagattatgtgtatttctagtgtatcaattgaaatactacttgtatttcaattgataaaatgggaaaatataaaagtctatcaatagacttttaaaggaggtgaatcgacgtggaaaacttcgacaaagtaaaagatatcatcgttgaccgtttaggtgttgacgctgaaaaagtaactgaagatgcatctttcaaagatgatttaggcgctgactcacttgatatcgctgaattagttatggaattagaagatgaatttggtactgaaattcctgatgaagaagctgaaaaaatcaacacagttggtgacgcagttaaatttatcaacagtattgaaaaataataaacaaatatctgagtcgttgtcattacggctcagattttttgtttttttgatagaatcaatgaaacttaacgcatgattttttgtaccttcgatattaactacatccatgacttgtcgctgttttacatgcgaaaaacaacagttttttctttagttttgatgtgatttaacgtaaaatataaaggtatacagaatcctagcgctatttctgaggaggaactagattgaccaatcaaaaaaagaaagaaatggtacaaacattccaaaataagtttgaaaaaaagatgcaagaattaaatttagattttaaccgagtggatttatatcaacaagctttttctcattcaagctttatcaatgactttaatatgaacaggcttgaccacaatgagcgattagaatttttaggagatgcggtattagaattgacggtttcacgctatttatttgataaatacccagaattgcctgaaggtaatttgactaaaatgcgtgcaacaattgtttgtgagccctcacttgtaatatttgcgaataaaattcagctcaacgatttaattttattaggtaaaggcgaagaaaagacaggtggtagaacacgaccttcacttgtatccgatgcgtttgaagcatttgtcggagcgttgtatttagaccaaggattagaggcagtctggcaattttctgaacaaatcattttcccatatgtggaagatgatgaattggacggtgttgtagactttaagacgcaatttcaagaatatgtacatagacaaaataagggagatgtcacatatcgtctgataaatgaagaaggaccggcgcaccatcgtctttttacttctgaagtgattctagaagaagatgccgtagcagaaggcaaaggtaaaacaaaaaaagaatctgaacaaaaagctgcagaacgtgcatataaaatattgaaaaataaaaacgcttaacattggatgcgtttaaacatcatgattcactagatggaaatatcatagttataagtatgattaatgatgacatagcatttatataatgaaaaattgcgtttttaaatatacagctaagattaaataattaagttaatcataataagatggaataagtgttatgaatggcgaatgaagttaaaatgaattagccatttcattcccgtgctgtagaacagtcaggaatatttaaaggagaatagtatggtttatttaaaatctatagatgcctttggttttaagtcatttgctgaacatacaaatgtccaatttgatgaaggtgtaacagcaattgttggacctaatggtagcggtaaaagtaatattactgatgcgataaaatgggtgttaggtgaacagtcagctaaatcattacgtggcgccaaaatggaagatattatattttcaggcgccgagcatagaaaagctcaaaattatgcagaagtaaaattgaaattagagaatagttctggaaagttacaagttgattcaactgaagtaacagttacacgtcgtttgtatcgaagtggcgaaagtgaatattatttgaataatgatagagcaagattgaaagatatcattgatttatttttagattcagggttaggaaaagaagcgttcagtattatttcgcaaggacgtgtagacgaaatattaaatgctaagcctatagatagaaggcaaatattagaagaatctgctggagttttaaaatataaaaaaagaaaagcaacttctgttaaaaaattggatcaaacagaagataatttgtcacgcgtagaagatatactttatgacttagaaggtcgtgtagaaccattacgtgaagaagccgcgattgcaaaagaatacaaacacttatccaaagaaatggaaaaaagtgacgtcttagtaacggtccatgatataaaacaatatagtgacaatattaatgaattagatgataatttaaaccatttaaaaagtcagcaggcaacaaaggatgctgaaaaagtacaacatacacaatctttaaataaatataaagctgaaagacaacaattagatatacgcatcgagtcattaaatttcgagttggtcaaagcaactgaagaagtagaaaaattcacaggacagctcaatgtattggaagaacgaaaaagaaatcaatcggaaacgaatgcacgctttgaagaagaacaagaaagtctattaaatcaagctgagaatttaaataaagagaagacagaagttcagttagaaatcgatagattaaaagctcaacaaaaagaattaaatgaaaaagtgcaatatttagaatcacaattgtatgttactgatgaacaacatgatgaaaaacttgaaaccattaaagatgaatattatcaacttatgtctgaacaatcagatgtaaataatgatattcgctttttagaacatacgatacaggaaaatgaatcaaaacaatcacgtttagattcaaggttagtagaggcgtatgaacaattaaagcatattcaatctgatattaatgaggcagaaaagcaaagcacaacaacgaaaaaagaactgaaaaacgcagaacaacaattgaatgaatacgaacgtaaattaacacaattaaaacaacaacgtagtgaatatgaagaaaaattacatcaagcatatcgttttaatgaaaagttaaagtctcgtattgatagtgcggcaacacaacaagaagaatatagttacttttttaatggtgtaaagcatattctgaaagctaaaaacaaacaacttacaggtatacgaggggcagttgctgaagttattcaagtaccttctgatttaacaaaagcgattgaaatagctttaggcgcctctttacaacatgtaatagtagattctgaaaaagatggcagacaagcgattcaatatcttaaacaaaatggattgggtagagcgacctttttacctttaaatgtgatacaaccaagacatattgcgaatgatattttaaattctgcaaaaacgtcccaaggattcattaatattgcatcagaggctatccaagtcgattcagattatcagaatgtattacaaaatttattaggaaacaccattattgtcgatgaattaaaaaatgcaaatgagttagcaagaaaaattcgttatcgcactagaattgttacgctcgagggcgatatcgttaacccaggtggatcgatgactggtggtggtgatcgtaaaactaaaagcatattggcacaaaaagatgatctagctaaaatgcgagcacaactagaagactatcaacaacaaaccattgaattcgaaaagcaatttcaagcaattaaagaagcgtcagatcaaattagtgaaaattattttgaaacaagtcaacaatataattctgcaaaacaaagattacatgattttgaattagaattagaccgtttgagaaaaagtgaagcacatttgaaagatgaacatgaagaatttgaattcgaaaaaaatgatggttatcaaagtgaagcaagtaagcagacgttaacagaaaagaaacaaagacttgaccaaattaaagcgcaattacttaaacttgaagaagacatcaatctttacactaaattatcaaaagaaggtaaagcaagcaccactcaaacccaacaacaattacatcaaaaacagtcagatttagctgtcgtaaaagaacgtttaaatgcccaaaaacaatctcttacaaaaatcactaaacaattggaaagtgtagagaagcaacaagaaaaattggatgagcaaattaaattatttaactcagatgaaatgactggggaaaaagcatttgaaacgattcaaagtcatattgaacaaagtaaggttactaaagaaaaacttactgttgatatagaagacgttaaatcgcgcagactagaattgaatgatacaattgaagagacagatcaaaaacttcaagaggctaaccaagatatattatctattgaaaatcgctatcaagatatcaaggcagaacagtcacgtttggatgtgttaatcaatcatgcgattgaccatttgagcgatgattatcatttaacttatgaacgtgcaagtgaattatatgaattagatgaagcgattgatgtattacgtaaaaaagtaaaattaacaaaaatgtcaatagaagaactagggcctgttaatttgaatgcaattgagcaatttgaagaaattaatacgcgctatacgtttttagatgaacaacgtgctgatttaagagcagctaaattaactttagaacaattgattgatgaaatggatcaagaagtaaaagatcgttttaaagaaacgttccatgcagtacaaggccactttgctgatgtgtttaaatctctttttggtggtggacaagcagaactacgccttactgatgatgattatttatcagcgggtgtggatattattgtgcaaccacctggtaaaaaactacagcacttatcgttattaagtggtggggaaagagcactaagtgctatcgcattattatttgccatacttaaagtacgctcagcaccatttgtaattttagatgaagttgaagccgctttagatgaagctaatgtaatacgttacgcgcaatacttaaaagaattatcagatcagactcaatttatagttattacacatcgtaaaggcacaatggaattttcagatagattatatggtgtgacgatgcaagaatctggcgtatctaaattagtgagtgttaatttaaatacaattgatgaagtcattaaggaggaacaagtatgagctttttcaaacggttaaaagataaatttgcttcttcatcagaagcggaaaataagcaagaagatttagagcaattatctgaattagaacaacaagatacggatcaaacgaaagaagacgaaccaaagaaaaaacctaaaaaattaaaagaagccgattttgatgatgatggtctaatttctatagaggattttgaagagatagaggcacaacaattaggtgcgaaatttagagcaggtctagaaaaatcaagagaaaatttccaagcacaactaaacaacttaatcgcacgttaccgtaaagtagatgaagaattctttgaagcattagaagaaatgttaattactgcagatgttggttttaatacagttatgcagttagttgaagaattaagagaagaagcacaaaaacgtaatatatcagaaacagaagatttacgtgaggttatcgtagaaaaaattgttgaaatataccatcaagatgatgaacactcagaagtcatgaatatagaaaacgaaggtctgaatgttattttaatggttggtgtaaatggcgtaggtaaaacgactacaattggtaagttggctcatcgttaccaagctgaaggtaaaaaagttatgcttgctgcaggtgacactttcagagcaggcgcaatccaacagttaaaagtatggggagaacgcgttggcgttgatgttatgagtcaaaatgaaggttcagatcctgctgctgtgatgtacgatgcaattaatgcagcgaaaagtaaaggcattgatattttaatttgtgatacagcgggtcgtctacaaaacaaatctaatctgatgaatgaattagaaaaagtaaaacgtgttatcagccgtgcagtacctgaagcaccacatgaagtactgttatgtttagacgcaacaactggacaaaatgccttatcacaagctaaatcgtttaaagaagtgactaatgtaacagggattgtgttaactaaactagatggaactgctaaaggtggtattgtattagcgatacgtaatgaattgcacataccagttaaatatgttggcttaggtgaaaaattagatgacttgcaaccattcaatcctgaaagttatgtatatggtctgtttgctgatatgatagagcaaaatgtagaagaagtcgatgatgtaactgatgaacaatcgaacgaaattgaaggtcaatctgatgagtcaaaatgatttaataaaaacaattcgtatgaattacttgtttgatttttatcaagccttgctcactaagaagcaaagaaattatttagaattattttacctgcaagactattcattgagtgagatagctaatacatttgatgtgagtcgccaagcagtgtatgataacataagaagaactggcgatttagtggaagattatgaggaaaaattgggattatatcgaaattttgaacaaagacagaacttatatgaacaaataaaacaacatattaatgatccagaacaaataaaaaaatatattcaagcacttgaagatttagattaattagagaacaaaaaggagggtatttgatatggcatttgaaggattatccgatcgtttacaaggaacgatgcaaaaaatccgtggtaaaggtaaagtgacagaagcagacattaagctaatgatgcgtgaagttagactcgcattattagaagccgatgttaactttaaagttgtaaaggattttgtcaaaactgtatcagatagagctttaggttcagatgttatgaaatcattaacacctggacaacaagtgattaaaattgttcaagaagaacttacccaattaatgggtggggaaaattcaacaattacgatggcaaataaaccacctactgttgtgatgatggttggtttacaaggtgccggaaaaacaacaactgcaggtaaactcgcattattaatgcgtaaaaaatacaataaaaaacctatgctggtagctgctgatatttatcgtccggctgcaatagatcaattgcaaacagttggtaaacagattgatataccagtttatagcgaaggtgaccaagtcaaaccgcagcaaattgtagaaaatgcaattaagcatgctaaagaagaacatttagactttgttattattgatacagcaggtcgtttacacgttgatgaagctttaatgcaagagttaagtgatgttaaagaaatcacaaaacctgatgaaatcatgcttgtcgtggatgcaatgacaggtcaagatgcagttaatgttgcacaatcctttgatgaacaattagaggtatctggtgtaacgctaactaaactcgatggtgatacgcgcggtggtgctgcgttatccattagatccgtaactcaaaaaccaattaaatttgttggtatgagtgaaaaattagacggtttagaaccattccaccctgaacgtatggcatctcgcattctcggtatgggtgacgtactaagtctaatagaaaaagcacaacaagatgtagatgaagacaaagcaaaagatttagaaaagaaaatgcgcacgtcttccttcactttagatgactttttagaacaacttgatcaagtgaaaaatcttggtcctttagatgatattatgaaaatgataccgggtatgaacaagatgaaaggtatcgataaacttaatatgaatgaaaagcaaatcgatcatattaaagcaattatacaatccatgacaccaagtgaacgtaacgatccagatactttaaatgtatctcgaaaaaaacgtatcgctaaaggctcaggacgttcagttcaagaagttaacagattgatgaaacaattcaatgatatgaagaaaatgatgaaacaattttccggtggcggcaaaggtaaaaaaggaaaacgtaaacagatggaaaatatgatgaatggtatgaatttaccgttttaaaatgtgtttcttaaattgagtaataattaaaaagtagtaatccacagcagagtcgtggattactactttttttgtgctacatccaatctataaactaatagaaagcgtacgatgttgaatcactattaaattccaatattttctctaaatgttgtaccttcgtattcagtacgatacaatccacgtttttgtaattcaagcacaacatcatcgacgatatcttctaaactatttggaaattctggaggcattaagttaaaaccatccgcaacacccgcgtcaaaccagcgttccatttcatctacaatatcctttggtgttccgatgagtgttaaatgcccacctccagcacttaaataacctaataactcacgtaatgttggatttttatctttaatgatttctagcacagtttgatagcgtcctttaggtcctttaaaagattcgacaggtggtaatggtggtaccggttcatccaaatcccagctatggcaattttgacgaataaaaaaggctaattgatttaaagcggtatcaacttctaaagattcatcgagtttttgtttttttgcataagcttcttcataagtttgtccgacatatgtaactaatccaggaaatactttcaaactatctttgggcttaccttcttgtatcaatttttgatttaatttgttcttgaaagcgctagcttgattgaaattccaagcaacagcataaactgcatcagcatatttagttgctaatgcgataccaggatcggaggcgcccgcttgcattgcaatgggtttcccttgagggctacttggggttgttaaaggtccacggacattgaaatgttctccttcatgattaatagcgttgattgctgatggattgattaacttattatcttctttatcgtgtaaaaagtcatccaatgaccatgattcgagtaaacgattcatcacttgtgcaaattcatctgcttttttatagcgttcctcgtgttcaggtaaatggtccatactatgattagcagcttccatatcagtcattgacgttactaaattccaaccagcacgaccttgactcatatggtctagactgagtagttgtctagcagctgtgaatggattggagaatgtactagatatcgtagcaactaggcccacatgttgtgtaacttgcgatattgctgctaaattaacgaggggatcaaaccaaaatgcaggcatatcacttttcgaactagctggaaaagattgattgtcagcaaaaaatatggcatcaaataagccttgttctgcagttcttgctaatgattgataataagtaatatcaccaatacgctcaatgcttgaatgtggcatacgccatgcagcctggtgatggccacaagcatagataagtacaccaatgtttaaatgttgtgcttgtgtcattgaatgactcagtcctccttattagttcattgttaagccaccgtcgactgtaaaattttgacctgtgatgccatttgcttcatctgatacgagatatgcaaccatattagcaacatcttgtggtgcggttaccttttttattggagtggtttgagcaattaaatcgaatacttcagtagtggtacttgcacttgcatccgttgtctttaataagccgccagaaacg

SEQ ID NO: 42 - DNA, 107996 bp, Staphylococcus saprophyticus
  misc_feature (65)..(65): n is a, c, g, or t
  misc_feature (34495)..(34495): n is a, c, g, or t
  misc_feature (63745)..(63745): n is a, c, g, or t
  misc_feature (63826)..(63826): n is a, c, g, or t
ctggaaaaatccctacgcttttttcaatcaatatccccacattttaatgcttttttatttttccnatcgctttttcaacttcatcgatttgttttatcgctgttgttgttgatccactagcaaaataccaaagttttggatctaattcatacactttattgtctttgattgctttaacatctttaataacgtcattacctaatgcttttttagctgtagcgttatcacttactgcttgaccacggtccattgcgaaaataatacttggatctttctcagcaatatattcatttgttacgttttgaccatgttggctatctttaatgttatcatctgcaggagtgaagcccattgtatcgaaaatcattgaaccgaaacgttcaccagaaccaaatgttgataattcaccttcattaactaataagaataatgctttatcattttttagatcttttgttttttctttcatactagcaattttatcatctaattctttatttaatgatttagctttatcttctttatcataaatttttcctagattttctgcatttttcttcaatgaattcaattcatctttatcgtctgcaccaacataaacaacttttgcatcaggtgctgcttttttaaattcatctagatttttttgatttgctgtacgtccagatatgtatattacgtctggtttagcttctgcaattttatcgaaattaacttctttaagactaccagtatttaaatacttatcatctttgaaatcacttaagaaatcaggtaatgacttgttaccttcacctttaggaagcgctttaactttatcttcaagaccaagttctttcattgtgtctaatgcaccataatctaaaacaactgccttttcagggtttttaggaacttcaactgtttctttaacagtcttggcatcactaccatcacgcttttcaccatttgctttataattattttcaatttttacagtttcatttgaatctttactcttcgaatcagtgtctgaagattttttatcttctgatccgccattactacatgctactaataaaaacattaacccaactactaataataaccctaactttttcatgtgcttaactcctcctgaatttttaatatgtactaccttctatgtccctaaaagtttaacaacgttacggttgcatcactcccttcaaagtccacgcatcatcttacatcgactgtgcaaatgataatttcggcacttcggtcacttcatcgtaataaatacaaatacgttgtccacgaatctcttcaattttgacatccatatcatataattcttttaaaatatctgtttggatgacttcatttttcgtacttgccttaacaagttgaccatctttcaaagcaataatatcgtctgaatagcaagaggcaaaattaatatcatgaataacgactacaatcgtcttatccaactctttggctaatcttctcaaagtttgcataatttgaactgaatgtttcatgtccaaattatttaacggttcatcaagtaaaatataatccgtatcttgagcaatagtcattgctacataagcacgttgacgctgtccaccagaaagtgtttttaaataacgacctctaatttcagtaagatgtaataactcgagtgcatactcaacttgatctctatcttcttgcttcaaacgccctttggaatgaggaaaacgtccaaatttcaccaattcttcaaccgttatattcaattctgtatgattagattgttttaaaattgatagttttttagccaagtcattacttttataatctgtaatcgctttgccttctatatcgatggtaccttcttcaaagtcaattaatcgtgtaatagcagacaatagcgtacttttacctgcaccgttaggccctatcatcgatgtaagtcgtcccttgcgtatctctacatcaatatcttgcaaaatcactttatcttgtatcgttttattaagcccttgtactcgtatcaattcgcatgtctccttttaattaataaataaatgaagtaactgccacctactaaatcaatgatgatactaacttgcgttgttgcttcaaagaaattctctacaattgcttgcgctaaaaacaaacttatccaacttatacaaatggttgccggtaaaatatatttgtgttgatacgttttcattaattcatgagccaagtttactgtcagtaaccctaaaaatgtaattggtccaactaatgccgttgaaatagacaccaaaattgcaactagaattaataaaatacgtgttaatgtctgataagaaatccctaaattgatagcttgatctcgacctagtagcaacacgtctaaataaggtattgcgtatacagtaatcataattaaaatgataagtatcacaccacataaagtgaccaatttcgtatttgacgcatcaaaattagcaaacattgcactttgtacagctaaaaaatcttctggattgataattaattctaaaaagcctgtgatacttctaaagaatgtgcctaaaataataccaacaagtaatattaaatagactgaaacatttccgattctaaaaatgccttgaaataataataatgaaaaaccaatcataactatgagtgatataaggaagctaatgtatagatttgtaacaaatacggattgtactccgaatacaaaaacaatcaatacttttacaaacatatatacagcgtccaaccccataatagatggtgttaaaagtctgttcgtggtaatcgcttggaaaataacgacagacgcagcaatggcaccacctactaaaatcatgaggatcaatttacgcaaacgacttgtaaattgatattggaatatttcgaaatcaatacctataatgagatacaatcccgcgataaccacagtaattgctattaacgtaaataatttagacttagcactaatttgcataattatgtcgtcctttcattaacaagattatgaaaataacagtgccaaagaccccaatcgttaaaccgatattaatttcatatggatatacaatgattctgccaaaaatatcagaaaacattacaaatatagaacctagcatcgctgtatgcggcaatgcatttttcagatggtctcccctaaaaattgagacaatattaggaacaataagccctaagaatggtaacgtgcctacagttacaacaaccagtgctgtaatcgtagccgtgataaacaatcctatattaattattttttcataattgactcctaagttattactaaaatctttccccataccagcaatagtaaaatgattggcgaatatatatgtaagtattaataaaggaatgcttaagtataaaatctcatatctaccgcttgtaataatggcgaagttaccatttaaccagtttcctatactttgtactgtattggttctcaacgcgataaatgttgcaaaacttgatacgataccacctaacatgatgcctaatagtggtatgaaaatgacgtctgtaaaacgaatatattgtactaatttaacgaaaaggaaagtacctgcaatacttaaaactactgcaaaaattaactttataatgatattctcctgtggaaagaaaatcattgataataaaatacctagtttcgcccattccatcgttccagcagtagtaggactgacaaatttattctgcatcatttgttgcataattaaaccagctagcgctaatgtactacccgatatgatgatactaaccgttctcggaattctacttgaaacaataatattcatctgtgattctgtaagatggaaaatgtctgtaattgataccttgcttacgcctataaataaagaaaggattgtaagtaccagtaatataatagctaagacaataccatttaataaaaatttcataaatgacctacctctaacccttccactataaaatgcgatgctcaaactacattggttatgataatcattatcaatacctataataaaattttaccatttttaatggtaaattcaatagccttgagcaatttaaacaaaagtatttaaatacaatctatatatgtatagcgttatatttaatatcacaccttgaaaaacacactttcttattttaattgttcatttttatgtaattttattctaatggactttatataatgtatatctctatttaaatatcatgcctgtttattttatccataagtaaaaaagccgagacataatgtctcggctttttacttattatatacggttgactaatacttgcttaaaattgtactttcatcatgacatttttataattaatagcgcttctactcgtcaaaaacgaagtcttcatcttttaatgcttctacatttaacgctaatgtataaccatcacctttaactgaaaagaagtcatggtttttagtcgttgtatctaaagcattttcaataattggattgaattcacgttcttcaaagtacggatcaaatcctaaattagataatgctttgttaccattgtatctcacatagtttaatacatcttcagctaaaccaatatcatcataaagtgaatgcgtataagctacctcatttttatataaatcatctaataatttatacatttcttgatctgcttgcagcttttcactttctgaaagttcattacgtaaactttgagcatccataccagtaaatacaccatgaatagattcatctaataagattttacgaatgatttctccagaagtcgtcattttaccttgcccagcaagataaagcggataatagaaacctgaatagaataaaaatgtttctaagaacacacttgatactcgtgcgatatattgatcataaattgaagcctctttaccccataatttatgataattattgataattttatctgatttgtattttaaatgtggttcttcaataacccatttatctaataaatagtttgtttcactggaaggtagtaacgttgtaaagatatgtgaataacttttagcatggatttgttccatcattgccataaatgaataaacggctttttttcttaaatccgtagtatgtaacataatcaatggcatgccatcgtcagcttgatgtgtatctaatcctgttaaaccagctaatgcttttttaaaagcctctttttcaggatctgttaatgttttccagcttgcaatatctttagatactttaaattcagtttctacccacatctgtgaaatattttgtcgccaaaacatattcgtcatgtcttcttgcgtattccaattgactgctttcatttagttattgtcccctatccagtaaatatttttaattaagcagtgatatgcagcctaatctaaccattggttaaggctgcctcataacaccgctgttcactttgcacgtttacatttcatttattaaattgaacaacttgtacactcttctacacttaataatttattacgtgtatagtataaagattttagacctttatgatgcgcatatacatataatcttgataattcacgcgtagaaatttcagaattaacataaagaattgtagagatgccctggtcaatatgtgtttgaatcgttgagattaaatcaattaatttcatttgatccgtattaaatgctgacttgtaataccacattgtttctggtgataggaatggcattggatagaatgtttccgcattaccatacgtacgacgttcgatttgatcaacgattggcattacagaactcgtagcattttggacatatgaaatactttgtgtcggtgcaatcgctaagcgatatgcatggaaaagaccgtttgtttccacttgctcttgcagtactttccaatcttctggtgtcggaatttctaaaccatcaaataatttgcgtactttttcatatttaggttcaaatgtttgtgaagtgtaaaattcaaaatacttaccattagcatagtctgattgttcaaaatctttgtatacttcttgtctttctttagcgatttccatagaacgttctatagaataataattcaacatcataaagaagatattggcaaagtctttagcttcttctgattcataaccaattttatttttagctagataaccgtgtaaattcattacacctaaacctacagaatgtaactctctattggctttcctaacgcctggcgcattttgaatatctgcttcatcactcactactgtcaatgcatccatacctgtatgaactgaatctttaaacttacctgattccataacattaacgatgtttaaagaacctagattacatgaaatgtcacgtttaatttcatcttctgtaccgtaatcgttaatgatagacgtttcttgtaattggaaaatttcagtacataaattactcattttaatttggccaatgtctgagttagcatgtaccttatttgcattatctttgaacattaaataaggataaccagattgcaattgtgtttgtgcaatcgtatttaacatttcacgtgcatcttttttctttttatcaatattaggatttgcaacaagttcatcatagtattcatctaaattaatgtcatctaacgttaaaccgtattctttataaatggtatgcggtgcaaacatatggaaatcttttccttcttttgctaaatcaaagaatttagatggcacaattaaaccagttgaaatcgttgataaacgtaaatcttcatcggcgttcacttttttcgtatctaaaaactcttctacatcataatggaaaatatttaaataaacagcacctgcaccaggtctttgacctaattgatctgcataactaaagccaccttcaagagattttgcaacaggtagcacgcctttcgctacacctttaattcctttgattgcttctccacgcgcacgtagtttagaaagattaatggctacaccgccgccaattttacttaattgctttgcagtcgaatcaataaaattaatagagtttaaactatcatccgcttctagcaagaaacaagatactaattctccacgacgtgcacggccagcatttaagaatgttggtgtcgctggttgatatcgttgttccaccattgctgaaataaattgtttggcagtcgctttatggccattagctaaataaagtgcaacaatcgctacgtgttgcttataatcttctagatattgacttttatcgtttgttttaagtgcgtaatctttaaagaatttacttgctgacatgtaacttgcaaattcaaacggaatacttttagcataatctgtaatttcttgtagatcagcttctgaatattttgcaaacaaatcaaaataaaagtcattatcaacgagatagcgcaaacgctcaatttcagtgtcgaaataaattgttttatcctgaatttcttctaaataaacttcaagcgcctcttgatctttttctaaattaaaaaagccattatctttacgttttgttacttcgttatttaactcaatatgattgtatttcttctcgtccataatcttcattgaactgtcccaccttatctttaaattcgctaatatcattttgtgtaccttgaacttcaaatttcattagtaaaggaacttgatatttttccgagatagatcgtccagctttcgcaaagttttgtccccaattgcggtttccactagctgcaacgcctcttagtaaatcatgatttatatctaaaaatgactgaactggttgtggtacttctccaaaacctatcgttccagtgaccaagatgaatggttcttcaatcttctcagtacaattattttgagtaatttccatagtgttagtaatttctgcttttttaataaatctacgtacattaccagagaatgaaaaataaacaaccttcattggatcaccttctttctaatactagtatgttattaagttcactttgacgttattaaatagtactttcatcgtatttatattttaaatgtattataagtaaccgtagcgcacatattgggtaaccacaatatatagtgatttcttttaactatatgtgattatgtaaaaactcaataattaagcattaatgcttgatttgtcatgattaaacgtccaaaatagtgtgattttacttaaaatttgatttattataaataaattgactacgtcccaaaacacaatatattgtgttttttcttggtcacaaatactatattatgtgtttcattatacataactcagaaagttatttaaagggctttgtttttgacaaaagtttgaattcgaaacagaaatggcaccaattcaacgttaactcgtacttttctatttataaaaaatttttttcggaatttaaagctattttagttgcttttttctaaaaccttgtaactattgatatagcgtcactcagcttatcatctaatactaaattgctcacaattgaaattatctaagcaataaaatactttgaaatatgtcttgaatttcattgaatcaatacagaacgtttgttcgtgttttcatgttacctcatttcccttttactttcaagcatatatacataatctatataattatgctaatatgaatacgttaaaaattaaaataatcgaggcgatacatatgaatcctaaagttaaagggatcattgctatcctagtttcagcaattggctttagcttcatgtctgttttcttcagattagctggtgatttgccggtgtttcaaaagtcactcgctcgaaatttagtagctatgtttatccctttatatttcatttataaatataagcaacccctgtttggtaaacttagcagtcagccacttttaatttcacgttcgactttaggtctaatcggtgttttattaaatatctatgccatagaccatatgatattaagtgacgctgatacgctaatgaaactcaatcctttttggactattttgctgagtttgatatttctaaatgaaaaagttcgtaactatcaaattatagcgatggtcattgcaatattcggtatgttattcgtggttaaaccagaattctcatcctctatgattcctgctattggcggtttattctctggtatttttgctgcaagtgcatatacgtgtgtacgtgcattgagcactcgcgaagcaccctatacaattgtattttatttttcattcttttctattgtagtattgattccatttacgattttcacattcgaaccaatgagtatgatgcaggtcatttatttaattggagctgggctcgcagcagctgctggtcaaattggtattacactagcctatagttacgctccagctaaagacatttcgatattcacttatgcatcgattatatttactgcattcttcggttttatattattcggagaatcaccagatttctatgcaatcttgggttatgtcattatcatagcttcaagctactacatgtttgaaaaagcaagacgccaaccgctatcaattcaaaaagaagaacaaaaaccaaaaacataaggagtgctttaccatgacagaaggacgtaataaagaagaattagaagatattacattactcggtaatcaaaataacaaatacgattttgattatagacctgacgttttagagtcgtttgataataagcatcagggacgcgattattttgttaaattcaattgccctgagttcacatcactctgccctattactggtcaaccagatttcgctacaatttatatttcttatattccaaatatcaaaatggttgaatcaaaatctttaaaactttatttatttagttttagaaatcacggtgatttccacgaagactgcatgaacatcataatgaatgatttaatcgaactcatggaccctcattatattgaagtttggggcaagttcacaccacgtggtggcatctcaattgatccatataccaattatggccgtccagattctaaatatgaaaaaatggcagaacatcgtttaatgaatcatgatctttatcctgaaaaaatagataatcgttaagatttcttcattataataactacccacaagatcttaaagtatcttgcaggtagtttatttttatattatttcattttttattaaattgattccaaacttaattttgcgctattgatatatacacttgttatttttgtaaaaacattataaaataaatccaaccatttagggggagggaaattatgaaaaaaattaattatacacacgaagaaattatggaaagtactccaagaaccggtttcttcggccatccaaaaggactaagtacattattcttcactgaattttgggagaggttcagttactatgggatgaaagcgatactcatatactatctttactatagtgttgctgagggtggtttcggtctaagtcaagcagttgcaatgcaaattgttgctatctacggtacattaatctacatgtcaggtgtcatcggtggttggattgccgacaggattaccggcacccagaatgccgtcttttatagtggcttcttgattatgataggtcatatcttactttcactaccaaataacttaacgttagtcatggtagcactcgcagtcattattgctggtaccggtttattaaaaccaaatatctcaacgaccgttggtgaattatatgatcgtaacgatgtccgtcgtgatgctgcattcacattattttacatgggtattaacttaggtagtttgactgcaccgttattaacgggttacttacaaactagaattagtttccatgctggcttcttagttgctgcaattggcatgttctgtggtttagtcgtttacgcaattaaacgtaagaaaaacttaggattagctggtcgtaatgttcctaatccactaactaagcctgaacttaaaaaattcggtttgatatctggtggtatcattctattattcttaatttacttacttatcctgcaattaaataatgctttaactttagaaaatttcagtttcttaattactattttaggtatcgtattaccgatttacatctttattaatatgattgcgagtaaagatgtaacgaaagatgaacgttcacgtgtttacagttacatacctttatatatcacatctgttgccttttggatgattcaagaacaaggctcaacgattttagcaacattcgcagataaaaagacacaattagaaatgtcagtgcttacaaatggtttaattgacttttcaataccatcagcttgggcacagtcactcaacccaatctttatcgtggtacttgcaccaatatttgcaacactttggatgaaattaggtaaacacaatccacctaccgtttataaatttgctatcggtgtaatcgttgctggtttgtcttacttagttatgattattcctttagctacaggcgttgaattaataaatccattatggcttgtactcagtttcttattaattacaattggtgaactttgtatatcacctgttggtttgtctacaacgactaaattagcacctgtgacatttacagcacgtatgatgagtttgtggatgttaagtaatgctactgcacaaggacttaacgcacaacttgttgttgtctatacaaaaataaatcaaagtgactattttatgtattcaggtttatttgcagtcgttatcggtatacttctattaatcatttcacctaaagtaaaacgtgccatgaaaggcgtatactaatcgttcatattactatttaaaatcaacttatgattttaaatgaattaatattgctcatccaagcttataaagctgggtgagcagtttttttatttcctaatagtttttttattataaggacattgagtacaaacatacccctcttcacattcattactgatgcaaagcaagctatatattattcattttataattacatctaattatcatcatttaaatgaggaaattaaatggcataaaattgattgcataaaataacagaatattctcaatattcttattttgagaatattattgcaatttaatttaataaagcgtaaaattttttttatatatttttattgggagtaagaaaggacgggaatgttttatgcaagacaaatacatagcgcaagactcagcagtagaatcaattcctcaaaaaggattttttggacatcctaaaggactaggggtgctattctttgtagaattttgggaaagatttagctactatggtatgcgcgctttacttatcttttatatgtatttcgctataaaagatggcggactaggtatggataaaggtaccgcacagtcagttatggctgtttacggtgcactaatatatatgacatcggtacttggtggttggatttcggatagaattacgggtacacgtgctgctactttctatggtggtgtactcattattatcgggcatattttcttaagtttaccattagatattgtcggattatttatctcaatgttcttcattatcgttggatctggtttaatgaaaccaagtatttctaatatcgttggtcgattatacccagaaaatgatacacgtattgatgcaggctttgttattttctatatgtctgtcaatctaggtggacttatttcaccattgattctaaatcagttcgtaaatactggtaatttccatgctggtttcttaattgcagctgtaggtatggcgcttggtttagcttggtacatgatatttaacaagaaaaatatcggtaatgtaggtacaaaaccaacgaatccattaaaccaaagcgaaaagaaaaaatatgcattgatatttatcgtggctattttaattattgctgcagtgcttgttattacagcattaactggtacattatcatttaatatcgttagtacaactgtattgatacttggtgtagcattaccaattatctatttcacaattatgattcgtagtaaagatgttactgatgatgaacgctcacgtgttatttcatttataccacttttccttttaggtgttgtattctggtctattcaagaacaaggtgccaacgtacttaacctatttgcctttgaaagtagtgatatgaaattaaacctctttggttggaagacagatttcggtccagcactattccaatccattaacccattattcatcgtgttattagcacctgttatctcactgatatgggcaaaaatggcacgacgtcaaccaagtttagcaactaaatttgtactcggtgcgtcactagctggtgcttcttacattatgattggtttaattggtcacacatctggtaataatttaagtgttaactgggttattctttcctacattatttgtgttattggtgaattatgtttatctcctacaggtaacagtgcagcagttaaattagcaccaaaagcatttaacacacaaatgatgagtttatggttattaacgaatgcatgtgcgcaagcaattaacggtaccttagttaaattgattgaaccgcttggccataaaaattacttcctacttttaggtggtattgcaatcgtagtcagccttgttattcttgctttcgtaccaaaaattgtcaaaggcatgcgcggtattaaatagtttctacaatttcaaaaaactatttattctgatgattttcattttaaaaacatctgggtcatacgtacccatgctcaaaaagaggacttccataaatggatgagtcctctttttttaaagttttacgattttgaatgtccttattggtctatggtttatggctcgagcttgaaatctctcactcatacaatgatcctaggtatcaaccattgatacaacatagattaaagtaagaaagccccttttcacctctatgtgacacttatatagagatattttttattgaatggctgatttgcggccctatatatatggaaatttttatcaccatactcaaatacaattcgcagataaacttgattaatacatgaatccctacatacatatatacgacattaaacatatttttaactaaaaacgggtacactgatatagatacaaatctaaaatcaaagaaatatggtgagcaccttgactaaaaaacaatttaaacatggcgtattattttaccatgaacataccgggattaaagacatctatagaggtctaggagatgtcgcaacatccttaactacattttgtagacatttatcaatacaactcagtgaaaatgaaggagatattattaccttctgccaaaaaattaaagataaacgttacagtgatgatgttgatattatctttattttaggcggcgatggtacggtcaatgagttagttaatggcattatgaagagtgaattaaatcttcctattggtatcattccaggaggcacatttaatgattttgtaaaaactttaaatcttaatccacgtcataaaatggccagtcaacaactgatgaatgcggaattaagaccttacgatgtcatgaagataaatgatgaatatgcactcaactttgttggacttggattaattgttcaaaatgctgaaaatgtacaaaatggtaataaagatatctttggtaagttaagttatgtaggttctacagttaaaacgttacttaatccagagcattttgattataaaatttcagttgataatcaaaccgtagacggtaatacttcaatgctcgtcgtagccaatggaccttttataggtggaagtcgtattccattaaccgatttatcacctaatgatggttatttaaatacgttcatcttcaaagaacaaagttcaagtgttttaaatgatgtatttaaacaacgtgatagcatgaattggaacaaaatgacagaaggcattaaacatttaccggcaaaaaaaataacgattgaaacagatccacaaatgaaggtggatattgatggagaaattaatctaaaaacacctttagaaattgaagttatcccaaatgctattcaaatcttgacattgcctgaagcacaagcaacgaaccaaccagaaagtgaataaatgatatagtgatatgagatgacttcacttacagtactctctaacttataaaataatggattaatttcatagcaataaacaaaaacgagtctgggacataaatagatgtctcagactcgtttcttattaaactaaatgatttatgtctctacccaattttatgacaatgtttagatatgatatgcactatcacctaggaaatattgttctacctctttccagttattaacacgtgtaaatctatcatcattaatattatgtgtagccgtatatataattggtgtacccttgaaaatacttagttgtcttgggttatcatcaattaaataatctgcatgtacaatatcttttctaccacaaaatacaaaatgctgtggatctaagaatgggaagtactctcttaaccacgcgtatttatcatgaaatgacgttggaacgtccattgctgcagttgcgataaacacatcatagtgttctgttaattttttaacaacatcttgcgcatctgacatcacttttaatttcttaaaaaagccaggctcccttaaaatttcagttaacaaaccatcatgctctggcatggcatgtctcaacttaatgccatctaacatatcaatcgtaatccctaagtctgtacgttgattgacatcttcaatcaatgcacctacagtatctgcaagcacttcgtccatatcaatcgcaatcttcttttttgtcatgtctcactctactcccttttcaattcataatctaaaataaatagcacacgatacatcgtcatataggctaaatctaatagttaatatttatttaagtatagcaaaaacgttcaacgaaaccaaaattgcaataaaattacaaatttagtaacgtagaacgtttcgttcatacaccttttataaagtaaactgcgctaatacttcacgcatttttgcattttgttctgggaaaccgatcgtaattcttacgccattcggaaattctcttgttatgcatcccacattgagtaatgcttcatataattcatgtggtttgtccgtcttaacaaagacaaaattagtttggcttgggtaaaagtgatcactttgtgataattcaaagaatttttctctttcctctgcattacgttcacggatagaagctaagtattcttgatcttccaacgcagctaatgcagcatattcagataaacgtcctacgttaaatggtggacgtatgatattatacttttcaatggcttcttttgctgcaattacataaccaatacgcatgcctgctaagccatatgcttttgaaaatgtacgcaataaaaatgcgttttcaaattcttgttgtaaagctaaagtatctggaaaatctttggctgtagcgaattctacgtatgcttcatctacaatcactggaatatgacttggtacacgttccaagaaattgcgaagcgcatcatgtgtaaaatatctaccagtcggattatttggattacataaccataccagtttagtatcattatctatttctgataagatgccatccaaatcaaattcaccgttttgtaatggaacttgcaccacatttgcagattctacaattgcgttatgataatattggccaaatgtcatctcgctcgtcacaattttatcaccaggcgtcaatactgctctcgaaatcattaaaatgacttcatctaaacctgcaccaaataaaatgcgtgctgggtctatatttaaatgtttgctaattgcctctttgattaatggagaacctgtttctggataatattgcaattcatctaaatgtgcttgaattgcttctttaacttttggtgacggaccatataaattctcattcgatgctaatttatgtaattcgcctttaataccataattttcttttaatgctctaggtgataacccaggttcatatgctgataattgctctatttgtttcttcattgttgtatcggtcctccttgaatttacagaaatttcaaaacttaataaccattataaacccaatgttcaacgaaaatcaatgcatccttatcatcaaattaagtttaaaatatgaggccagtacatcattagatgtctcagcctcatatttttgtatactaatgttttattaaattgtgtttttctaaataatcttttgccacttgatatggatctttattcttaacggttacatcataattcatctgttgcatatcttcatctgaaattttaccttctaatttattcagtggttttttaatttctggatgttcttttaagtatgattccttaaacataggtgccccttgataaggtgggaagacatgtttatcatcttctaatacaaccatatcatattctttaagttcagcatctgttgaataagcatcaatcaaattaatgtctccattttcaattgcttgataacgtaatttaggctccattgttttcacgtcacctaaatcaaggtcatatgcttttttaacggcaggataaccatcgccacgatcattaaattctaaagtaaagccaggtttaatctgatcacttactttatttaaatcaccaatcgtcttaatatgatgtgcttctgcaaagtctcttttaactgctaaagcatacgtattgttgtatttcattggtttcagcattgtcatatcaaatttatcttccagactagattttgcttgttgatagacttgcgcttcttttttagattttaaatcctcttttgttagttcacctagtaccgtacctgtaaactctaaatagccatcaatgtcatccgattttaatgcattaaataagaatgatgtttttcccataccgtctttaacttctacagtatcctcggtatcttgttcaattaaaatcttatacatattcgtaatcacggatggctcagaacctaatttacctgctagagtcactttgtcacccttttgacctagcataggcgcaataatcactaataataaaataattacaatgacgccaagcgaaataagtaattttttatatgacatgttttgcatatatcttaaaactaaatcaaatagtatagctaataatgctgctggaatggcaccaattagtattaatgaagtatcatttcggtcgatacctaacaagataagatcacctaaaccaccagcacctattaatgctgcaagtgtagcagtcccaataattaaaaccatcgctgttctaataccagccataataacaggcatagcaataggtaattcgactttcgaaagacgtcgtccaggtttcatacctatcccttttgccgcttccactagtgatggatccacttcgtttatacctgtatatgtatttcttaaaataggtaataatgcatatacaactaacgcaatcaccgctggtactttaccaataccgaacaacgggatcataagacctaataaagcaagagaaggtattgtttgtaacactgcagcaatattcataataacttcagacaatttacgtgtctttgttaaggcaatacctaatggtacacctattaaagccgcaatcaacagagcaataaatgaaatttgaatatgttcaaatatcgtggttaataattctcccctacgttgaatgagtgtatctatgaaggcattcattcatgatgacctcctttacgttccgataatatttcaaaaatgtcctgacgacttaacacgtattgcgtagcatttgtaatatcttgaacgataattgcttcatgacttgctaacgctgaatagatatctttcacgtatttgtcactatcgataacaggataacctgctttcacatcttgctcatggataggaagtccatcaatgatttctgataattttaaatcattaaccgtacgttgtaattgatttcccataaattgtttcacaaagtcatttttaggatgattgatgaatccttctggcgtatcaatttgttctacatgacctttatttaacaaacaaattctatctcccaatttcattgcttcttgaatatcatgtgtcacaaaaataatcgttttcttgatttgttgttgaagttctaataaatcatcttgtaatttctctcgactaatgggatctaacgcactaaatggctcatccattaagataactggtggatcggctgctaatgctcgaacaacgcctacacgttgttgttgaccaccagatagctcatcaggttttctatttttatatgtttctggttctaaaccaaccatatccatgagttcttcaacacgctgattcgttgtttgttcattccattttttcatctgtggtacttgcgcaatgttttctttaattgtcatatgtggaaataaagcaatttgttgcaacacatacccaatatcccatctcatttcataaacaggatagtcacttatcggcttatcattaaaatagatgtaaccttctgaaagtgagattaatctattaatcatctttaaagttgtcgtcttaccgcaaccagatggcccaatcaatacaaaaaattcccctttttgtatattgaaactgatatcatctacggctgttttatccccataacgttttactacatttttaaattctatcactttttcaccttcactttaatatactcaaattacaattatttattatagtttattccctatttatatataatttatgtattattcatcaaaaactcaaaacaacattaaacatacatcttataaaactttttataaaaatagcgaagttaatttttaacaaaaactaaatctatggcatacatggttgcatagaaatattaattattgtcaaattaacttcgcagttatgttgttcatgataagtacacattttcatttatattattaagtatatagatatatttttgaaaattaaaatgtttagctcatttaacttttagctttgtatgtttggattttttctaaaaacatcggacagtaatgctttaatttataacttcctacaccatcaatcaaaatcatctcttgtttagattctggttttctttttgcaaattcttctaatgtgaaatctgagaatatgctgactggtggaatacttaacgactcacttaattgcttgcgtacgttaattaattcatcaaacaatgcacggtctacaccttcgaccgtattgatatttactttctctttcgacttacgtttaaatggtgttgtatatacatctacttggttattcaataattctttgactgaattatcacaagttaaaatttcatcgtgttcatttaaaaatcctttaaatctaagttcatcaataaggtgactgagatcagatgttgtataatttttcataatgccatgtgttgatagctgatgataatcacaatagcgaatataatctgactcttcgcctctcaacacctgaataatcacactataactttcttgttgtttcatacgtgcaatacaactgacaatcatcttagcttcatccgtcatattgtacgttttattttcaacgacacaattactacattggccacattcttctaatttttcatttggctcaaaataatgaacaagcgtcgcttccagacatttcttagttttagtataaagtatcattttattaagcttttcacccattttatctttgtaatcatcgtctgcttttgatgatgaaataaaatattggtgcaagccaatatcacgttcactaaatagcaatatacaatcactatttaaaccatcacgtcctgcacgtcctgcttcttgataataagattctaaatcacctggcatattgtaatggatcacaaaacgaacattagatttgtcaattcccataccaaatgcgttggtagctactacaacacggacacggtcataaacaaaatcgttctgtgctgcctcacgttctttattagaaagcccagcgtggtatatggtactatctacgccgttgttttctaaagcgtcatgtaattcttctacttgtttacgcgttgaacaataaataatacccgctgcatttttatgttctttgacgtactccatcacaaatttctgacgttgataagtcggatttactttaaaaactaaattacgtcgttttgtacttgttttaacctcatcatgcttaccaatattcaaacgttccatgatgtctttttgaacttctatcgtggctgtcgctgtaagtgctacaatcgtaaaatcttgtggtaatgcaaacactttatgaataacatcttgataactcggtctaaaatcatgaccccattttgaaatacaatgtgcttcgtcaaatgcaactaaatgaataaatagttgttgtaataatcttataaaataaacattatcaaaacgttccggtgcaacatataaaaattgaatctcaccttttcgaagttgggtctcaatttctttttgttgcttttgcgtcaaactactatttaagtaagctgcatgtatacccatggcctttaattgatcaacttggtctttcatcaaagaaattaatgggctgatgacaatcgtcgttccacccaacattaatcctggtacttgataacaaattgattttcccccaccagttggtaacacacctagcacattttgatggttcatgactctagttatgatttctttttgaccaggacgataagtatcatagccaaaataatgtgataatgttgactccatgttataaaatccctcattgttcttttagttcttcaagttcgctccatcttgagatatctgtttcatactgttcatttaattgcttttgttcttcattcaacgcttttatcttagcgtaatctgaacttgctgcaaccatttcttcatcaatctcttctaatctctgttcagttgtatcaatacgttcaatgatagtttcatattctttttgctctttatatgataaaccttttttctttttcttctcattatttgttttattttttgattgttgtttagcctgttgttctatcttttgatcttgctcttttttatatgcttcataatcctcaaacgtaccgatgatgcgttccatttttccgtcatgaatataccaatattcctgagcgactttatttaaaaagtatcgatcatggctgacagtgatgacggcaccaccaaatgtctcaacataatcttcaagaattgtaagtgtctctgtatctaaatcatttgttggttcatctagtagtagcacattcggttgatggactaataattttaaaagatataaccttttttgctcgccacctgataatttatagatttttttaccatgtgttgcacttggaaatagaaatctttcaagcaattgcgttatagatacggaagtgccatctttttctttagcaacttcactttcttctcttaaatagtcaatcatcctgatgtcgcgatcgagacgctcttctgtttgtttaaaatatgtgaccttaacggtttgaccaattttaagattaccttcataactttgatcttcaccgctcaatatattcagtaatgttgtcttacctgcgccatttggccccacaatacctatttgttggccactttgaatgatttgtgtgatgtcttcaaatagcgttttatcatttatccgtttggttaaatgctctaattcaaacacttgttttccaagtcttgaatatgccaaattcaacgatgctttatcttgatgttgttgccctttcacatcttgttccaaatcattaaatctgttctttctagcttgttgtttagtagaacgggctttaactccagcacgcatccatgcgagttcttttttatataaggattgttgcttagcttgttgtttttgttctatgacttcattttcagcacgtttagcaatataagcttcataattacctgtatatgtcgtgagtttaccgcgatcaagttctatgatgcgtgacgatacttcatttaaaaagtaacgatcatgcgttacaaacaatactgtatgcggatattgttttacataattgattaaccaattgatagattcaaaatctaaatggttggtaggttcatctaagagtagtaaatcaggttgttctattaatgttttagctaagccaacccttttttgttgaccaccagaaagtgcactcacttctttcgtcgtgtcataaatacctaattttgacagaatcgttttaatttctgcactataatcccacgcctgataattatccatctcttcttgtgcattcatcatttttttgaaatcatcatcgctttgtgttgcagtatattgatttaaagctgattcatatgcacgaatcacttgtagtgttttcgtttctgaagttaatacagcttcaaatacagtcatattacgatcaaattcttgcttttgcgaagaatatctaatgcgataggcgttaggatgcgagacttcagcattaaagtcttcatctaatccagctatcactttgagtagtgtactttttcctgtaccgtttatacctacaagtcctattttttcaccttcagaaatagacaattgcaaatcatcaaaaatgattttatcggcatatgatttatgtaaatgttcaattttgtatgcttccattgtccaacatccttttaaatatcgaaaattataattatttctgttaaacttaatttcagttctatatattatacacctttttgaactcaaatgatacaaaggagcgaagcttatgtcggaaaatttccaaaacttacctccttatatccaagcattaatagcaggtattatcacttggctactaactgcattaggagcagcagcggtctttatttttaaaagagtaaacgacaaaatattaaattctatgcaagggtttgctgcaggtataatgattgcagcaagtttttggtctcttttacaaccggctattgactatggcgaaggttcatcagtaccatggttacccgctgctatcggttttctattgggcggtcttttcattcgtggattagatttagtcatcccacatatacaccctaacacccaagacacaaaccaataccacgaaggtgtaggtactaaaaaactcaataaaaacacgttacttgttttagctattacactccataacattcctgaaggcctatcaatcggtgtcgcatttggcggtattgtatctggtaatggacaagcgacatttttaggtgcacttggactcgcaattggtattggtattcagaatattcctgaaggtgctgccctatctatgccgatacgtgctgcaggagcctcaagatggaaagcttttaattatggacaagcatccgcaatcgttgaacctttatttgcaacgattggtgcagcagccgtattaattattacacccatgctaccatatgcgttagcatttgctgcaggtgcaatgatattcgttgtggttgaagaactaatccctgattcccaagccagtaataacactgatcttgcaacgttaagtttaatggttggtttcataatcatgatgatacttgatgtagctctaggataagagataaggcatacgatcataccctattcaaactttataggatttccagtaaaaaacgtcaatttctattttttatacatagaaattgacgtttttttcttttataaaatttttagcacattgtgacgcattccccatacgtaatcaatgcgtgtacttatcgattaggttataaaaataagcgcccgagactttgatgtctcgagcgctttaatgaaattattttttctcttgtccttttggacctgttttatattcatactctgatggtttaatcttatcgaaatctgggttgtcatagaatctcaataaatctccgttaagcacgtcatcactcatctgtaaatctttttcagattgttgtttacgtttttcgaagtctttaggtttttctgtcataggttcattattcttattatcataaattctgccattaacatatttatagtctttggttacaaagtcaccatttctaaatggtactgtgtcattgtgatctttagataataaatctgtacccatcatgagataatttttcgtgtcgatacccattaagtgtaagatcgtaggcattacgtctgcttgacctgcataagtcttatcaacggtaccttctttaccaggaatcttcaaccagaaaccagttcggtttaaatcgttgaatttagctggcgtaatatcttcgcctaataatttttccatcgctttgttatgattttcagagataccatagtggtcaccgtaaatcataataactgagtcgtcatatagaccttttttcttcaattcatttacaaattcttctaatgattcatctaaatatcttgctgtttgtatataaccatctaccgttgagtcaccagtgtttggtttttcaattgatgcgtcttcaggagacactgtaaatggataatggtttgttaacgtaattaaatgattgtagaacggttgtttttctttagctaaatagtcagcagattctttaaagaactctttatctttaagacctaagttttcaatattatcttcagacatatcataatatgtcgcatcatagaatttatctataccaaagtgtttgtatacttgatcacggttccaaaatgttttgtagtcaccatgcataacactagatgtataaccttgttgttgatctaatatagcaggtaacgattggtaagtattatcaccttttagagaatacgctgacccttgaggtaagccgaataaactgttatccattgtaaactctgaatccgatgttttaccttgaccagtttgatgatagaagtttggatagtatctatagccttcattacctgttgaaagtttgtttaagaaaggcgttacttcttcaccgttcacttttttattaattaggaacgtttggaaactttctaagtgaattttaataatatttttcttcttagctgcaccaaaatattctttattaggctcagtttgcttttgttttgtgtaattcaatacttttgttaaatcatcttcgtttgccaatgctttttgttgattattttgtattgttttaacaccatcataaacagtgaagttatatggtcctaagtacttaactaaatatttatggtcaaatgtacgcgttaataattctggacgatctgattcagcaaacgctaagttcaagaagaataatgcgattgaagcagccatcacgactggaacaaatttcttactgaacacgcgcttatcaagccatttttgtttaaagattaaaacgaataagtaaatgattgtatcaataaagtatacaaaatcataccatttgaatgatgccgtcactgcaccacccatagattcaacattcccaacttgattcaatgtactaaatgttaagaaatcagaaaagaatctgaagtatacaacatttgcatatagtaagaacgttaatataaagccaccaataaagatgaaccaaaatgctttcttacctttgaaaaataagaaaatacttagtactaatgcgattaaactgtatggattcattaataagattaagttttgaactaatcctttaacacctaaagaaaaatcaacatagtatgaaaaatacgtttttaaagtgacagttaatactgttaaaataaaaaacgcaaaaagagtcaatttctttttgtgcaatttcatgtttttatcccccgatatagattaataatggctggaatacaatccaaaccttgtatagaatggctaagttacttttttcaataaacttgttagcgatgttgatatctctaactcagtctgcgtccttatttggtttgttgatgatacttctggctaatatttattaaaatcttcaaatcagattataatttattaataataaagtcagtgtattacttcattttttaaatttaattttttaaatatccattaagttggcatatttaaactatattgatttaattaacgtcgtgttttacgagtcatttacaaacttcaatcatttgtaatgcattcgtaacaaaacgcacacagttcaattaataaatataaagcaaatccagttgaacatcaagtaaaaacacacttttttatgtatttaaggactaaataaatactttgttaacggcttattaaaacgatgttaactggttattaattattaatatgccatttaattatacgctgcatattatgtatattaatcaggcttgagtcgtatgtcatcataatttaatcttcactccagtgatagatactgatataaataaaaaaactgcaatccaacaagatacacttgttgattacagctcactaaagtttaattgttcaatttcagttcaacactgttatttgagcatttctaattgcatacgatactcaataccatgaaatagttgattcaaccaatttgtgtatttaattaaatttttctccgcgctttctacatcgataaattggaacttcaatttagtaccttgatgcttttgtcctaatttagttaaatgatagcttgcaattgtaccaatttgggggtaactacccagtgtataatgatcgttcagtaaaataatgggtgtgccatctcttttaacttgtatcgtgccaatttgtactgattgatgcgcaggcatatcttcatagaaagcttttactggtttaccttctacatacatgccgaccctgttcgctttactcgtcactttatattcaccagatgtaaatcgacttaatgctttttgttcaaagtcttctgtgcctttatttttaataacatggaacacatcagacatataattaaaggacaatgcgtagccatcaattccccagtcagtttgatgtgtttcttctaaattctcaaaaagtttatgatgacgctcggtataatcacgtttcatattgatttcgtcacctttttttaaacttcgtccatggaaaccaccgatattcgatttaaaatctgttgatgttgaacctaaccattcatctaactcgaaaccgccacctattgccaaatacacccgagatgtatgcttcgtttcagtaaatgctaggacgtcacctttttccattaaatataatttgtttggcaagactttcatatgtgctgtctcagctttaaagctgccaccactcatagcaattaatgtaggctccgtaaaacgaaagcttgccattctatttgtcatttccaatgtagcttcatgtttatcattggctactaatctatttgctatttcatgggaaagcggatctaaggcaccacctggaatcacaccgtcatgttcatagccttttcgtccaaaatcttgaaaactagaaaataacccttcgccttctattatgattgacatggttcaaagcctcctaaatccagcgattcctctgtcgttgcttgaaatacaacattatcaccaagcttaagtttggtgaaatcttctaattctggattaaataattttacaggtgtataaccgatcactaaccagtcaccataagtatctgtcgtcgtaatccccgtctttttgccttcgataataactgatcctgcaggtatgaaggttttattacctccagtatgattgacgaataaacgtttagacatgccagtcaaataagggaaccctggtgtatagcccatcatagaaacaaaatatgttggttgcgtatgtaattttacaaatttttcaaagtccaatttataatgtgctaataaagcgtctaaatccggaccatattctcctccataaataactggtatttctattgaaggtgcgggcgcgtcttcatgtttaatctctaattgtatagtttgcatcaatgctttcatatataagaatggagactgtatatggtggtgcttgatcatgtcacgtgcatcataacaaatcatcatatctgattccgtcggcacaatttcagtaataaatggatattgtttatctgctaaatactttttcaaagctaataaatcttcagttaaatctttagagacctctttttctatagaaaccacaatagcttggtccccttgactatatattttcataggctcacctcataatttgttactatcgataaaatacatctaatgcttgtgccagataatgtacgattgctttcatcaaaaaaaagacaataataaactgaatgatacatgatgtcgtaatgaccaacttagttaagtaaatgctttgtcgttgtgttaataaatgtactacccatttggtaatgacagaaattataataattactagtatccaagctagtatcatcattttgcttcactcacattctactgttattttgcccttattttatttactcaattcatgattaaaccactttatgattttatttactacaccatgtttatactttttatattctatagataaatttctacgtcggcaacctctctcaaactatttatcagaaaaagggataccttgccttgcgcaactttttcctttaattcgtttaaataaaagtttttttctagcaatgcgccattgtcgatcatctcttgtcgcttacaaccgagtaaaaaatccgcttcataaacaggtgtaaaaagttgattattttctttaatagctacattcccaatatcaaattctaatattttacccttttcatcataaagtagtataaggtctgtctcatgcatgtgcgctaagtggtctctttgcgttgttttgttgattactactgatctaggtatatgattttgtaattgttgaaattttgctgtaaatgcctttttatctgataaatctgcaacgacatgttgcattgtgccatctggatttagaataagtttcgttctaaaatgtcctactggatgtttttcaatgatggtattgatctcattttgccataaatcaccatcaaacttgaatcctaatcgtgctgctgaccgctccattcgtgctttatgataagacaatcttggtaatttacctgcttccatacgcaaagtttcaaatagctgcattataatctctccagtatttttgttttatctttaaattcttgcacttcattttcaggtatagaatcaatagtaatccctgaacccactccataaattgcttcatcatttaagtattgtattgtgcgaattggcacattgaaaatagatttaccctccggcaataataagcctattgtgccacaataagcatgtctcggtgtctgttctaaatctttaatatattgcatcgtattcaatttaggtgcaccggtaattgaaccacatgggaataaagcagttaatacatctattaaatctgtcttgctactaagttcacttgttaccattgaagtcatttgaaaaacggtgctatacgtttcgatatgaaaaggtttatagacctttacggttccagtctttgcaattcgactcatatcattacgtaataaatctacaatcatcacgttctccgctctatcttttgctgattgtgccagtgtcatttggttaagttggtcttctgctttcgttttacctcgtgcgattgtccctttcattggtttacttaatagtacatctgctttgtttttaaaaggtcctcgttggaaaaataattcgggtgacatagaggcaatttgtatttcttctgtgtctataagtgcagcataaaaaccatgattttgttgtaataacgtataatataaatctgcaatgggttgtcgtatttgatctgttaaacgtgttgtgtagtttacttgatatgtattgccttcaataatcgccgattgaatcattttaatatgttctaccagttgagacgatgggtgtttaaatttaaaattacatttctgttgcggcggttgtttgtcattttgtttttcagcatccgtagcttgatcaaacgcataagctgctgcatatatatacgcatcttcaattttcactgtagacatttgagaattaaaatacggtgccgcttcataggctatataaagcgcaacataataacctgctttttgcttagcttctgcaaaagaaatcacttccccaaccgtttcaatgttcggagctacttttttatctgtacactgtgtgagtaaatattgatgcatttcatgattttcttcatctaatgtataacgataattaaagtgtatttgcatgatacgcctccactatatttataaatgtttgtatttgtgttaacccatgttcacttaggattgattcaggatgatattgaacgccatatataggtaatactttatgttctaatcccataataatattgtcttcattgattgcagtaatttctaatgtattcggaaaagtttgtgcatgtgcttttaaagaatgatagcgcataactttaaaagtttccggtaattgatgaaatagacctttgccactatgtcgaatttgagtagtatgcccatgaatcggtttatcacttttgataatatcgccaccaaaataagtcacaatttgttggaagccaaggcaaacacctagtatgggcattgcttcagagaatgttttaataacctcatttaataatggataatctctgggcgcacctggccccggagaaataataattgctttaggtgctagctcatatattttatttactgttaaatacgtaacgtctatcacttcgattaagccacgataactttgttttacatagtctacaatgttataagtaaacgaatctttattatcaataattaatatcatgttgtcgcctctttttaaaaatgttcaatagtctgttatacttattatcacaaatattagcttgattttacagtttaaatatattattctgaatcacgttataaatgaatataaagaggttcctagctgataccctctataaaaaactagacacatgtacaacgtctgtcttttttatagagataggcgtttttttatgcgcttatctaaaccctgtaccagttagttcgactatttttaaggagtgcaagacaaatgtcagaacaaacattagacaataacaaagccatcgtcgtatttagtggtggtcaagatagtacgacgtgcttattttgggcaaaaaaacattttgagtcggtagaacttgtcacattcgcatatggccaaagacatgacaccgaaattgaagtcgcaaagcaaattgcagatgaacaaggtgtgaagcatcatctacttgatatgtcattactttcacaacttacacccaatgcattaacgcaacacgacttagacatcgaggttggtgatgatggtattccaaatacctttgtacctgcaagaaatttattattcctttcatttgctggtgcattagcttaccaaaccaatgccaaacatattattaccggcgtttgcgaaactgacttttcaggatatccagactgtagagatagctttgttaaatcaatgaatgtcacattatcactttctatggataaagacttcgtcattcatacaccattaatgtggttagataaaaaagccacatgggctttaagcgatgatttaggcgttttagattatatccgttacaatacgttaacttgttataacggcgtcattggagatggctgtggagaatgtccagcttgtcaattaagagcaaatggtttaaatgcttatctagcggaaaaaggagtggactaatatgttccaacaaaattatccaagcgtacaacatccctatagcttcgaactaaataaagactttaatttttctgccgcacattacataccaagtgaggatgcaggaaaatgcatgcgtacacatggtcacacatactttgtaaatttaacaattgctggtgacactttagatcacaatggtttcttagtgaattttagtgaattgaaacaattggttcatggccaatttgatcattatttacttaatgatttaccgcaatttgaaggcaaaagcccttctaccgaaatcgttgcccaaactatttatgaaatggttcaaacttcgttgaatcaacgtgacaaccaacctaaatgtttacaggtctatgtcagagaaacgcctaccagttatgttgtttatcgaccaaaggagacaaaacatgagtaaaatacccgttttagaaatatttggcccaactattcaaggtgaaggacgcgtgataggtagaaagaccatgtttgtgcgtacagcagggtgtgattatcgttgtagttggtgcgattcaagtttcacttgggacggtagtgctaaagaagatattagaatgatgtcagctgaagaaatatatgaccaactttatcatattgctggcgattcatttaatcatgtcactatatctggtggaaatcctgctttaattaaaggcattcaacaattagtagatttatttgatgacaaagggattcaaagtgctttagaaacacaaggtagcaaattccaaccatggatgactcaaattgatgacttaactattagccctaaaccaccaagttcaaaaatgaaacctaatctccctattctagatgaagtcatcgagcaatgtgtgccggaatcattgaacttgaaagttgtaatctttgatgacgaagactaccaattcgctaagatgattcatcatcgttatcctactgtgcctttctatttacaggtcggaaatccctatttagatggcgagcatgtagaagctcacactgaaaaattattatcattatatgaaacattggtagaccgtgtgatggtgagtagtgatatgaataatgtatatgtattacctcaattacacacactgctttggagtaacaaaaaaggtgtttaaattgagtattgaatgcgatccgttgtataatgctctttgtctatataacgaatcgctttttttgtgatgcaaatattatatagtggattatcactgtagacatcatttcattcatttatatcaagttattcttattcaaactatattggataatttttaattaaagacacgaaattaaatgattaactttaacttaattgatataatgtttcaatgaagtatctaggttaggagagcatcatgccgattaatatcattataaatatcgctgcgatatgcatcatacttggtattgatttatatcgtcagaattttaaacaactaaagtttagctctatactaatagcaatctgtctcaacagtattattaatatatttctagttggagaatatgattacatcgtattttatacatgtggtcaactaataatttggacattattacaattatatctagaccgaaaagtagctgctttcaaggtaacagaccaaaaatttatcgcagttgtactcacaatcattttgagtacttcactcattcttacatatagtacgagtcatgattcttattacatgtctatcccttatttagcgccagctattttccttattggagcaattttactattttatagtaccttcagccaaaagaaaaagaacaacttaaacctatgaatcggattaagcgccctatctttgtcgggcaattattgattatactntcctttacgataatgaccttattaacaccttattggtatgctttcatcataattcatttactatttatcgggtttttattatggcagaatatatttttttctaataaatgattaagatattatattttgtggtatatgataacagttaattaagtttttattaaaggaggtaaatcattatgggctttattcttatgttaattgtcggtggtttaatcggctggattgctggtggtatcgtcggtaaagatattccaggtggtattttaggtaatattattgctggtatcgttggttcagcattaggttcttggctacttggagattggggttggcacttaggtggcatcgctgtgttcccagcacttatcggtacaattatcttagtagcagttgtatcatttatttttggtaaattacgtaaaaaataatcgcaatttttaaaagccaatttcgaataattgaaattggctttttttctatgtctttgtagaccatttatcataatattattagtcctaattgcactttatataaataaaaaagcgatacaagctagccacttatcaagtgtccaccttgtatcgcgtgtgttgcaaaatcattacgcacactaactttcaatacgcttaacaattaacaggtaactcatctgtttttaattaattctttttctgatttacttttttcagacatttcatgttgtcgatcgttgcgttcgatttcatggttaatgtcttgatttatattttgtttattattatcacacgcatagttaaagttcgttgcttggacgatgtattttggacgttgtttcacttcataataaatacgtccaatatattcgcctacaataccaatggatatcaactgtatcccaccgagtaataagatagcggcaatcgtagagaaataacctggcgtttccacaccacgaatcataataccgactgaaatgtatcctatataaagtaaactaataaagaacacgataagcccgagatatatcatggcccgtaatggtttattattaaaagaaattaagccatctataccgtaatttaataatttactaaatgaccattttgattcgccatcttcacgctctacattttcatacgtaaacactttggtattataaccaatccactcatataatccttttgaaaaacgattatattcatctaattgtgtgagtgatataacagcacgttgactcagtaatctaaagtctccaataccgtcttctagtttaatatcttcaacaaaatgattaattaatttataataaattttagtcattacttttctggattgcttttcaccaattctatcacgcttagctatcacttgatcgtaaccgtccatataaccttcaatcatctgagggatgagttccggcggatgttgtaaatcggcatctatcataatcacaccatcacagtctttactatgttggtagccagctatcattgcagattctttaccaaagtttcggctaaatgaaataaatttcacgtgatgatcttttgtagccatatcttgtatataattaattgttttgtctttactaccatcatctacaaataatatatcgtagtcatagtgatggtactgactatctttcgataaaatctcagtcaatttttcatacgtttttaaaatcacttcaccttcattataacaaggtactataactctcatttgcatacctaaacaccttcatttcaattacttcaattttactttatcaattcccacctacatcatgctatctaaatcaattaaatttacacaatctttatatagccttaatgttcaatggtaaaacttaatgtatatgcttagtttctgcctttgcttaaattaacacgttcatgtcaatttaatgttcataaactcagtaaaaacgattttttactcaattaatcatattgactgaaatttaaaatgattaaagatataaattgttacattaagtctatcaactattggaattatttgaaaacaataaccattgcaacaataaataaagggagtgggacagaaatcaaattttttaatagagatttcgtagtcccaccccggcaaggatgactaggattgaaaaaagcttgatataagcgtattttcaattcagtcatctactgcctaaacgaaaaagagtctgggacaactatttatgtcccagactcatctttcgtttattttaatgtaccgatgcgtacttcatctggatctttaccttgtctttcatcacgattcattgcatcaatttctgcgatatctgtgagctcaagattaaaatcgaagatatcataattttctttaatacgttcaggtgtctttgattttggaataataagtcggttatgtgcaaggtgccaacgtaacacaatttgagccggtgtcttctcatagcgttctgctagttttaaaatgacttcatgttcaagtaaacctcgatttctcatcaacggcatccacgctgtaacagcaatatctttactatcacagtatgcttgcagttcttgttgattaaagtaaggatgtacttcaatttgattcacagctggcacgatatctgtttcactcattaatttctctaaatggtgttgtttaaagttacatacaccaatcgcacgtattctacccgcttcatataatgcctccatagctttataactttctataaataagtcatctgcttcacatggccaatgtattaaaaataaatctaagtaatcagtacctaaattttcaatagatttagtaaaaaattcaattgtacggtcataaccctgataatcattccataattttgatgtgataaataaatcttcacgcggaatgtcagctttttttaatgcattgcctaaggctatttcatttttataaaaataggcagtatcaaatgcacgataaccagcatctagtgctgttgctactgaaacattcatttcgtcatcagtaattttatagacacctaatccaactttcggcataggataaccgttgtttaaataatatacgtcttctaacataattcaaaccccttttcatttatgcttctaaatcctgcacatattaccaatactgttattaaaatacactatatcatcttttcatatatataaaaatcaaaaaaccccaacaaagcattgatgctttgtcaggatttcgtataactattccatctgaaactggaattagattaatcgttttcttcttcttcttcaagttcttctatagttggtcttgttttattatgttctaattctaaaataactgtgataatttgatgattatcaatttctgaaataacccatctatcgtattcagtatccacataatcattttgctgtaaattggtattatgtgcttgtaaccaaccgccaatggtatctatatcttctgaatcctcaaattcaatgccaagttgatcgtttaaatcatctaataacacacgaccattaatttggtatctattttccgttactttaacaatatcattgacttcatcatcgtcaaactcatcacggatttcaccaacaatttcttctaatatatcttccattgtcaagataccagcagtaccgccatattcatcaattatcaaactaatatgaacatgttcacgctgcatacgtaccagcgcatcactaatacgtgttgtttctgaaatcataggtaaatcatgaatgtagttacttactttaatttgtttacctgaagcatattctgttaaaaattctttaacattaataaagcctttcacatggtctttatctccatctgctgtgattggataacgtgtgaattgatgttctttaatcgtttctaacaattcgtctacattaaatggctcattcattgtaatcatttgtgtacggggaaccatgatatctttagactgtctttcatcgaatgaaaaaatattttgcatataagctaattctgtttgattgatttctccaccgttatagctattattaattatgatttttatttcttcttctgacattgcatcgttattcgcatctgggtcaacgccgaacatacgaataatcatccttgctgaaccattcattaaccaaattaatggtttcataacgacaccaaaataataaagtggtcttgaatataacaatgctaatttttcagtatgttgaatcgctaatgtcttcggtgccaactcacccaatactacgtgcaagtatgtcacgataataaaggatacgataaatgaaattgtagtagttaaagcatctggtaaatgaatcagttcaaataatggatgcaataatttgtcgaaagttggttcacctaaccaacctaaacctaatgacgttactgttataccgagttgacatgccgataagtaatagtctagattttttatcatttttttaactacgcgtgcgctaccattaccttccgcagcgagttgatcgattcttgtactacgcacttttactaaagcaaattccgatcctacgaataccgttgttaatgctattaaaagaaaaaatattactaaattcattatggtcactgtttccaattagttccctatttctagggattcacctccatatttcgtgtcacaaaaggtgaccgaacataagtattttttttattatgcatgactatgttgaatactaaatcctccccattgcgacacctccctaaaaatacgcatttcttttattttatcataatgaatacagttcttgttatttacatgcttaaaaatcaatattctaacataacatttaaacctaaatgacaacttaagtcaacttttgtaattaatccattcttaaaatcaattttcaaaaagatttattattacattaaagtactgatttaaacttgtgaatcttaccagatttaatcgttgctagcacgtcgatatcgtcattgactatgacaatatctgcatctttcccaacttccaaactgcctgtttgtgtatcgatatttaaagctatcgcttggtttagactcgttacacgccataaatgatctaatgtatcacctgtaaagttgattaagtttttcaagccggtattcattttcaatatacttcccgctaatgcgccagaagctaaacgcgcctcggaccctttaacaattacattttgcccacctaaatcatattctccatcaggcatgcctttagctctcatagcatctgtgattaaaaagaagcgcgcattccctttttgtttataggcaattttaacggctgcaggatgtgagtgaataccatcaacaatcaattccgtacttaattgatcattcaaccaagcagcaccaaagacccctggctctcggtgttcaaatgatgttcctgcattataaagatgtgtaacatgtttggcaccatgtgcaacagcatcatttacctcatcaaaagtagcgactgtatgtccaattgaaaattgaatctctttatgtaatgcctctagtgtttcatgcgcaccttcaacttctggtgcaaaggtaattacttttatttgattattagctgtggtttgaaattgttcaacttttgcgacagtaggtctttgaacataagctggattttgtgcgcctactttatgttcagatataaacggtccttctaaatgtacaccgacaatagttgctgcattgtattgatcttgcgctttttggtaattcactatattttctaatgctttcgtgatgttttcatcagattgcgtcattgtcgtcgctagataactcgtagttccttctgacaatagtgattcagataaatgtttcaacccatcataagaagcatccatagcatcttccccatatccaccatgcatatgaatatctataaatccaggtataatatgttgtccttgcgcatcaattgttgttaaatctccgtgatagtctcccgatttaatttcagttattttctcattgttaataacgaggtagcctcgctctattgtctctgtctcagtataaatccgtccattttcaataacatattcgctcattttttcaaccttctttaagtttatttactctatgcatctttattgcagtctttattcacattttaccaaatcaagtgccaatattatattcaaaagtttttaatcctaaaattcataaaacaaaaaagccagaaatcgcactcatgacatgagacgtttctgacttttttaatctaagctattacgataaatctactttactcattcatagcttctgaagattgtatttcatcttgcgttaattttggttttaataaaccataaatgattgctgccacgatagcgccaacaattattgcgataagtgattgcaacacatgactaaagtccgtacctaagatgacgataattccaccatgtggtgcttgaattgaagagcctaggcctaatgcaatggcaccggctacacctgagccaaccatcattgatgggataactctaagtgggtcagcggctgcaaacggaatggcaccctctgtaataaaggacaagcccattacatagtttggtacaatagaacctttttgttctttggtgaattttttacggaagattaacatcgctgtcgcaatagcaagtggtggcaccatacctccaatcattgctgccgtgataggtgctgcatttccttctgttaatgcagctactgagaacacataggccgctttattaaacggtcctcccatatcaattgccatcattgcaccgacgactaatccgagtaacataatattcgtgccagataaactttgtaaaccattcaataatgtattattcaaccaagaagctggtggattaatcacataaatcataagcaaaccagtaatagacacagacagtactgggaatattaacgttggtttcaatccttctaatgattgtggcataccacttgttaatttcttaatgcctaatgttaagtaacctgctaagaaacctgcaatgataccaccgataaatccagaatctcctgtactagcaagcaaaccacctacaagtcctgatgcaaaacctggtttatccgcaatactacgtgcaatgtaaccagcaagaataggaataataaacatgaatgcactcttgttacctatattccacaattgctcagcaaaggcattgtattcagaactctttggatcaaatgaatttgcgccaaataagaaagcaatcgccattaagataccaccagcaataacaagtggtaacatattagaaacaccattcatcaagtgtttatatattgtgttacctacaccttgtttttcattacttgctgcgcctttatttcccgtattaccacctttagctacaaatggtttacgcgaagtatcttgcgctaaatgaattaattcttctggacgtttaatcccatctgctacaggtacttccacgacatttttaccatcaaaacgatctgtttcaacatgtacatccgctgctacgatgacacctgttgcgttttggatatcctcgtcagtcaggtgattcttaataccacctgagccatttgtttctacttttattttaacgttcattttttcagcttgttttttcaaagcatcacgtgccatatacgtatgcgcgataccggttggacacgctgttacagctaaaatgtatggctcgtttgaatccgtagttgaagcaggcgtgccttgtgcttctgcggcttcttcttccgttgcttcatcatcagctttatcgataatgttaaggacttcttctggtgactccgcatgtaataatgatgctctgacattttcatccatcagaattccagataatttagctaaagcatctaaatgtgtttgagcaccgccttcaggtgctgcaatcataaagaataaatgtgctggttgcatatctaaactttgataatccacacctattttagacttaccaaatgcgattgcaggtgtattaactgcagctactttagcatgtggaatcgctataccttcaccaatacctgttgtactttgggattcacgattatgaatcgcttctttaaaacttgttaaatcattcaatttacctgcctgattcagctgattgactaattcatcgataacaccatttttgtctgaagctgataaatccatagcaattgtatcttttgttaataactcagtaattctcatattactcactcccacctaatgtcgtaataacgacttgctttttaatatcttcaatcgcagttgctgtagccaaatcctcgttaaatgctgtagcggttccagcagacactgcttgtttaaatgcttctttaattggcaatccagcctcaagaccggcaaccataccagcaaccgtactatctcctgatcctactgtattaactacgtgaccgttaggcacaatggctttaaagctctgttgtgcatcgacataaactgcgccttcaccgcctaacgagataacgaccgattgcgcaccccttgttaatatttcagtcgcatacttgattacatcttgatcagtctcaatcgtagtgttgaacatcacttctaactcgtctttattcggtttaataaataaaggatgataccctaataccgattcaactaaatctttttctgcatcaaccactagtttggctcccgttgcattagtgatttgagcaatttgttcatatgcatcattcggtacacttttcggaatgctcccagcaactataaccgtatcctcttttgtggtttttttaatttgtgttaacaatgtttcgaactgttcatctgttatttgcggtccaggtgcattaatttctgtttctttcccagtttttaatttaacattaattcttgtatcttcattaacttgtacaaagttcgtacctatatctgatttagctaatgtttctgcgataaattgaccaggaaaaccacccgcaaatccaagtgccgttgatgatacatcaagtgttttaagcactcttgatacattaatgcctttaccgcctgcaaatttatatgtttccatggcgcgatttaatccattaagttcaaaatcatttgcgaacataatgtagtcaatagaaggattaaaagttaccgtataaatcataatgtgcctccaataaaattatattgaccagcaaacagatgaaattgtttaagtgattgtgcctttttggaagtaatgattgaaaccccttcttctaaaggtacatgtgcaaaataaactttttcgtatttatcgtggtctatcaatacataaacttgtgtgcctaattgcatggcatgatgctttataattgcttcttgttcatctggtgtcgtcaaaccatatttcaaatcaataccattcattcctaaaaacactttatcaaatcgataacgacgcaatgtttctaaagcgatcgcaccaacggttgcaaatgttgtagatttgacttccccaccgataatcagtgttctgatgccatgttttaatagttcttcaacatgtgttaggccgtttgtaacaacaataatgtcactcgctttgatataaggaatcatttccaatgttgttgaaccggcatctaaaaacacacaatctcgattttcaatttgacttgctgccagcctaccaatttcttgtttctcccttaaattggtacttcttttatccgccaagttaggttctaatgcagatgattgatttagcgttgcacctccatgtactcttttgagtttcccgaatttctgcaattttgataaatcacgccgaattgttgaagcactacaacctgtgcgttcaattaattcttgtaaagttaaaaaatcttgttttgacaattcagtcaaaattagttcatggcgtttttccgttatcatcgcttcacctcatctcaatgtcattataatgtttacgctttcttttttcaatcatttttcgtcaaaaacaatcaaaaacagtcatatacaaccttaaaagttctattaattgtcatttttagttattagcaaataaagcactacgttaatttttatcatcgcaaacttaatcttttatcgtttgtataatatgaacaaacatgctatttgctcatctaaaacctaatactcgtttgtagttcatcatgtggttgcaaattgagttatcttaaatacttatatacaaaaaatgacagacagcaatctatatataatcagattcctgtctgcccctttgttattacatgcttttatttatgtatgacttcgacgacctttgccttcgtcacattaattaagtctctaacatctattttaatctgtgtgccacgttcaccaccacttacataaagggtatcgatgtccattgcttgttgatctattatcgttggaaatgcgcgtttcataccaataggtgagcaaccacccctgatatatccagtaacttttttcaaatcatcaagtggcattaaattcagtttcttctctcccaccgcgtgcgctgccgctttcatatctaaagattcgcgaactggaataacaaacacaaaatgagcgtgatttgtattctcaagtacaagggttttatatacaagaccgggatccacgcctaccttttcagctacactttcgccatccatatgtatttctgaaacttcataagtattaacttcatacggtattttacttcggtcaagcattctcattgcattggttttcttttgcttcattatcaatcactccatatgacttttaaaaagatgtcattacattaaactttttagctaatgcttttttaaattcatcgtcatttaatttagcttcagtttttttataaactcaactaactcatcatgcattgattcatcttttaaagcgtactctatcgtcgtttttacaaaacctaatttttcaccaacatcataacggtcgccctcaaaatcatatgcatagacttgatctgctctgttcaagcgttctatggcatcagtgagttgaatttctccgcctgcaccctcgccttgcgtagctaagtaatcaaaaatatcaggcgttagaacataacgccccataatagctaaattagaaggcgcagtgccttgttttggtttttctacaaattcattcacttcatattttctaccaaacttttgtagtggatcaataataccataacgatgtgtttgtgcttcatccacctcttgaacaccgatgacagatttcccagtttcttcataagcttcaatcagttgcttaatagctggattatctgattcaacgatgtcatcacctaataagacagcaaatggttcatcaccaataaattgtcttgccgaatatattgcatgacctagtcctttttgttctttttgtcgaacataaaaaatgtttgcaagttctgtagaatatttaactttttctaataaatctgttttacctttttcctgaagaatcatttctaattccttttgattatcaaaatgatcttcaatggcacgtttgtgtttacctgtcactataataatatcttcgatgcctgctcgtgccgcttcttctactatgtattgaatcgtaggtttatctaaaataggcaacatctctttgggcatcgctttcgtagctggtaaaaaacgtgtacccaatccagcagctggtatgattgctttctttatttttctcaaaacgctcatccttttcctattaatatttatgactactaccagaaaataaactatccaatttattttttattcattactatcatcataacattgatatgagtgtctttatactgatttccctaatatagaaggaagtgagacagaaaacaaattttttaattgagaattcgtagtcctacctatgtaaacaagacaagggtgactatggtaatggtttacttgagctaaagcacatgcataagaactactaattttcataaattaaaaaagtagttctttaaagaagtgggactttacattttcaattcagtcatctactgcctaaatgaaaaaagcctgagacatatatatttgtcccagacttctatatttaatttaatgaaggttgctgtataacatccccggatttactaacaacaactttataatctctttgtgttttatattcatgaaaagtatagtacatgccgtccttagattctttaacctttttcaaaacgacattttcccctaggttatctacagcatgcttttgtgcaatcacttcagattcttgaggagagatactcgaatgtaacggtgattgattgtcattcactacatacgatttatcaaatatactcgcttgattgtcttcacttacagttactctgtaatacgtatttggttttgcttcatttttaaatgtaaaaatataataatatacaccttggcaagtgctatcgataccataatcgttatatggattagatttatgattgtcatgattcacaagcgtctgtgctttatttagtgctttagaaaattgcggtaagttcgcttgtcccgtttcgttctcttttaaatcgtgcgtcgttaatttggcaataggttgatagtttgttgtattatatggcgcttcatttttttcttctttcatcgctgccttaattgaattcttatctttttgttttgctttgtccttagcttcagcattttgttctccaactgaaatactagaaatcgtttcatgtacttttgcaagcgcttgttggtttgtagctataaaaagaagaaaacctaaacagcaagcaagaaggaacgccataatcgttaacattaaatttttcaagttcatccccttacttacatttattacttttcttatcatgttagcacagattattctataaacacttaaatagaacacaatttaaaacaaatgtaatctttgttacatgaatattacgtaagtctagcttatttaatacaagtgtcatattcgttttcagtttttagtattagccttatgacataaacacttaaatgatttatttctgaaaacagtcattcactatcccctttttacataaataaacccttcacagtttccactttttaacgtcaactctgaagggtacatctgcatattcaacttgttcttgtttaaaatttaaatattactgaagcgtgatctaatcattttttctataaatataacgaacatacctaataccattactaatactgacatatataagggaaattcgaaattgatatcatataatgtgcctgctacaagaggcccgataaagttgcccatactggtaaatgtagaattcagcccacctgcgaaaccttgtcgatttccagcaatattagaaaaatagtttgtaatcgctggtcggatcatatcgaatccgataaacacgatgaaactaataatcataattgaccaatagctatgaacaaatgtcagtgccaataaaatgatagcagaataaagtaatgcataagtgataaatgttaactctttgaaatgtttcatgaatttatcaaagaaaaacacttggaatattgcgccggctatcccaccaccagtaatcgcgaatgaaatatctaatggtgaatagtgtgctttatctgctgtgtataatgggaatagcgtttcaaaagcagataggccaaaagcgagtacaagtgtcaagataattggtgtcagaaatactttccaattaatttttgatagtaattctggttgatattgagtgaaaccatcttgcgtactgttctttggatttttgattaatgcaatcgataagattaatgccacacatccactaaaaccagccacataaaacggtaatctatgtgaaaattctgctagaaatccacccatccctggtcctaaaatgaatcccgaattaataattgctgacatatagccgaaatttttcgctttatctctacctacagaaatatcagcaatcattcctgttacccccggcataaccataccagcactaaatccacctagtattctagaaacgattaaaagtgagaacgtatgacttgcagcgaataagaattctgaaatagcaaaaagacccaaacctatacaaataatcagttttttacctaatttatctgccagcgtaccaccaaatggtgaaataatcatttgtgctaaagcaaagacagcaacgagtatacctaagtcactaccttttaagcctaagtctttcaaataaaccggtaataccggaacaactaaaccaatacctaaaaagacaagaaaaatattaaaatataatataataaattgcttattcacgtttctcactccattcttttttaatatataaattgctggctatttataacattgataaaaccttaatattacaacattctataacagttctatagcaaatgacaataaaaaatatttactataaacactattatacaaactcttaataagaacttgtataatagtggtgtaatccattttcagaacggaggtttcttatgatttatcaagtagacggcaaaacgattgttttagtattggaacagggtgaagatattgtagaagctgtaactgatattgctagagaacaaaatggtaagtttggcacagtcagtggtattggcgcttgttcaagcgcagagctcaacttttataatctagaaacacaaacatatgagaagaaattaattgatgaaccattagaattaatcggtttaatgggcaacatttctcatattgatgaacagccctttgcacatttacacgcaacatttggaaccaatcaatatgaaacacttagtggtcatttaacaaaagccgttgtatctgcaactgctgaaattatcattacaatgactaatctagacatcaatcgtaaacacaatgaaaccattggtttgaatctgttagatttataaataaaatgtgcttacctttatttttaaatcattcactaactatgcaacccaataagaatgtaagtgctatacgcaactattcattatgcttaatttgagtctgagacataaatagctgcctcagactcttttatccattaaggagtagttgtctgaactacacgtatttttataaactgtatttccatttattttacataaattcacttaaaagtgtaaattcagaaaatacgcaatgtgctcctctattgacttagatcttgttaatattaaaattcactttacttttataatatataatatgatgatttgggatatgatttaaacatgatttagcatttaaccgttactgctttaatccaaccgtgtcataagttgctatgttatggtgtttaattaatttatatgaattcattctccaactatttaattatacattttatctttatgaatccaacttgtacttttcgttgaattttattttcaaaaaatgtatcatgtagtcttgtatttcaacaaattgaactaacatctctcttaagttatgcgatttaaggtagagatatatttattattgtatataataagcatttaaactaatacattcatcagcaacgacatactaaaaagaaagtaggtgtattgatgtcggctcgatatattgctagaactgtgttccttattctaatcattatttcaatattttttaatcattattttccgtttatgacattaaatttatttctagcatatgtgccatttgaactatgcttactcttgaatttatttaaacctatttataaatacgaatggccgctctttattatatttgcacttatttttgtatttatggttcctaatacattatatatggttacagacttaatccatttaaatcaatttagatttaatttttatcagggtttattaatcactgaatgggcctatttcgcatttttagttgcagccgtattactcgcactgtatctattaattttaatgtttttagaaattgagcaatttacacaccgtatgtggttaaatcgactcatcatcgtagcaatgatgttccttaatggactcggtatttacatcggtcgcttcttgcgtttacattccgtttatcttattaatgaaccactccgtatttttaatgaagttgcggcaagcctgaaatttgatactttgtgcttcattttattacttgtagcattgcaaattatcatatatgcatttgcgaaaggagtgcgtagtgcaaaatgactttcaatattattattttaattattatactcattttattgcagctaatcattggtcatctattacatgatgtaggattctcatatacgcacagcattatcttgatgtgccttcccttaggaatcggtttgttttacctacaattattttattacgagcgtcgcttccctaagtggaatatacccatccatgttaagatcagactaaaatacatgtatatactcactttcttcgaatatgttgcgctatacatttgtatctttagaatgtaatcatttatcgtttacatagtaaacagttaatgaattgtatcatcagttctaatattacatgtgctaaggattaagtatacgtgtctgagatataaatagatatttcgcctacttttaggtgctagttaaaaatactgatataaaaaagctcccgtctaagttttcatttttcaatgtcaactttaacgggagttatttatatgacttagataataaatcttattctcaataaaagacgcaattgatgctgtaaaatactacacttgctactacttaactgctgtctaaatacttctattttaatgtacgtcatctatttatcattgatttttcaaagcttgtttcacttcttctacagagtctgcagagatgcgcaattgtgcctgttcattgtctgaaagtgctagttcaacaatattttcgatacctttttcacttaaaacagttggtacacctaaacagatatcagaaaatccatattctccttctaacaatgcgatacttggtaataaacgatgttgatcctttagaattgcttcaatcatttcaaaaactgcagacgcaggggcataatatgcagaaccattgccaagcaaagcaacaatttcagcgccaccctttcttgtacgttctacaatttgctctatttgcgtttgattcaacaattgatgtaaagggacaccattgacattggttgaatttactaaaggtaccattgtatcaccgtggccgcctaatacaagccctctaatatcttttattgacacatttaaagcttctgcaataaaggattgatatcgtgcagtatctaatacaccagactgtccaatcacgcgttctttcggaaaacctgacgcttttaacacagaataggtcatcgcatctactggattagtaagtacgataattttgcaatccggtgaatactttacaatttccttcgtaacatcgaacatcactttttcattaatttgtactaagtcatctctactcatacctggtttacgaggacttcctgcagttatcacaacaatatctgaatcggctgtatcagcgtaattcacggaacccgtcactttcgcatcaaaaccatataccggactgctttcaaatatatctagcgccttacccttcacttgtccttcgttatctggtcgatcaatgagcactacatcagctaactcatgctgcgcaacaataaatgctaatgtagcgcctgtgttaccagcacctattatggaaattttctttttggtcataaaaacatccccttaatcaagcaatttatatctcaattaaattataacacgcattcattttaaacaatgattgcaattcataaacttaagttatcatctttacttatgtttgcgttggcgcttaaaccatttccatataatgaaaatggcgaggataatcagtacaatatatataatgcgagaataaatatccatatagtacacaattgcatgccaattaccgccgactgcttgacctaaataaattaaaacaatattccatattaatgttcctatcgttgtaaatagcataaataatggtagattcattcttgttaaaccagcaggtatagagattaaacttctcaacaaaggcacgaaacgacagaagaaaatagtccaataaccatatttatcaaaccactgtattgttctatcaatatccttcgtttttacacgaagaaactttccatatcgattaacaaaacgatataaattgcgttcaccaatccaagctcctattccgtataagacgattgcaccgacaactgaaccaattgtagacgtaatggtcacaccaataaaacttaaatcagatttagtagtcataaaaccaccaaaagttaaaataatttcagacggtataggcggaaagacattttctagaaaaattaaaaaagcaataccccaataaccatattgttccataaagtgtgtaatccactgttccatgcattacctcctcgttataatcacgcttgctctataagtcatttactcgtgactagttaaaaaaatggttagtcaaaccatataaataaaatgtaagtccaaataatactaaggaaagtatggttaatattaatgataaaatcattatccgtttaaaatgatgaataaaaacaacgaataaaatcgaagcattataaaggaaaaacaaaccaaataaagttaccatcacagtaatgtcaggaaaaacgatgttcaatatagcaataatcaaagcaaatcctaaaaatggaaaagtaataaagcgtttttgaaacttgagttcttttctatggtgttgttcgttctgagtattcattatttacactccttttaaaattaaattaagggatatcgtggcctaatgaagctgtataaatatcaaaccattcttggtctgttaatgttacctcaagtccagcgattgcgtcatcaatccgttctatcttatgcgtacccaacactggcatgattgcggcaggatgtttatctaaccaagccatgatgatgccattcgttgtcacattatatttctgtgctaatggtgaaacaattgccataattcttgcagccttttcatcacctagatcaaagagcttgccacccgccatagggctccatgacataattttaacatcatctttatacatatgattaatgacaccattgtcaattgcatctaatgtgtatggcgacacttctaattgatttattgtaatgtgtaatttgtcacacacaaggcatttacttaacaaatcatattgtgatttattaaaattcgagacaccaaatgatctcactttaccctcgcttactaaagcctttaaagcttctgttacttcatggggatccatcaacggtgatggtcgatggataagcaaactatctaaataatcaacatttaattgttgtaatgaacggtctactgcttttcgaatatgtgttttactatgatcatatctgtgtccatgaatgtcttgttcagggcttgatggtagtacgataccacatttcgtcacaatctcaatttcatctcgtaattgaggtgataattttaaagcctcaccaaaaataccttcgcatgtataattaccgtaaatatcggcatggtccatcgttgtgaccccgcgctctactaactcatttaaataacgattcaattgttgtggtgtccactgccaatcttgtgctctccaaaacccttgtatcacttttgaaaacgagacatactgatttatttttactttatccatttaaaaaccaacaccttttattttattagataattaagtgaactgtaacatgtctaatttgttgcgtatttgattttcatcaatctgttcaccaatcatcacaatcgttaatggcatttcatcatcaataatttgataatctgggagaccaaatgcatattgaaattcataagtttcatgaggcatatcacgaaatttaacatatccctttaatcttagaacattatctgggagccgtaaaataaattgataaaataattgacgatcaatcggcccagaaaaatggtattgtacactatttataccatgatgatgcatatggctttctttagttggcaatgatgtatttgtaatcgtatcaaaagcatccatgtgcatatctgcataagttgtataaaatttgggcgcttctgaattaattttatcaatagctttaagatcatcatacgcatcactttttaataaatccattttattgactacaattgcatgacttacttctaattgttcttccatcaattgttttgtactatgggtatattgggttctggtcaaaaatcttggtgcgtctaataatcctattaccataggcgtttggacattagcgacaatttcaggatcttggcatgccgcaataatttctatcggatgtgcaatacccgtcgcctcaattataatatggtgcattgcacttttgttaagaaaatgttttaattgttttattaaatcttgttgcaagtcacaacagacgcaaccatttaatatcgatgcgacttcaacatcgtcgcttaatgcagcgctatctacatctaaattgccgtattcatttacgatgatacttgggttttcattttttcttaataaatatttcacataattgctaaggaaagttgttttcccactacctaaaaaacctgttacaattgtaataggcgtcttaggttgtttaatatttttcataaaatcactcatttcttaaacacaaatgtttgtgtaaaatttaatttatacatataattaaacttttacttgataaaatattagatatcttctaaactttatacacactttattttagcatggcacagtgcaaaagtatgattgaagaagtgtcaaacacaacgcaagacggattcaggtccgatacagagagaacaaaacggatagaatgtctggaggagaacttatgtctgaaccacttaatttaaaggaacaactttgctttagtttgtataatgctcaaagacaagtaaatcgctactactcaaataatgtctttaaaaaatacaaactgacttacccacaatttttagtattaacaattttatgggctgattcacctgtcaatgtaaagaaagtcgtaacagaattagcattagatacaggtactgtatctccattactcaagagaatggaacaagttgatttaatcaaacgtgaacgttctgaagtagatcaacgtgaagtgtttattcatttaactgacaaaagtgaagcaattcgtccagaattagacacggcttgtcaagatgttgctgttgcatcatcattaagcccagatgaatctcaagagttaaatcgattactttcaaaagtaatcaatgccttcactgaagaaaaatctaaataatttttcacaacaaaagtttaggtactagctattaaaaattattcctttaatatacttgatttataaagcgagctcaaacacttatgtgtttgagctcgttttttcataataaatcataactcatatttaacagctctatctaccgcggtttaaatgaataactaaagatttattatttattttagatgtcttcgtttccacgtttattttaatcagcattaatggctaccatttggtgtaaataaccattcgttttattcaatagcgcctgataactgccatcttctaaaataacgccatcttgcataactataattctatcaaaatgtggcaatagtcttaaatcatgtgttgccactatcaaggtttgcgcagtttgatgaattgcttccatcactttatcggtatgatatatatccaatgccgttgtcggctcatctaatatccaaataggcgcatgttttaaaaacaaccttgctattgccaatctttgaacctctccaccagataatgtttgacctgaaagtgtaatcattctgtccaaatcaatatgcgctagccccaagtcatcaagtacttctctcatttcaagatcacgcttttcagcaaataaattctcacgaactgttccatcaaaaagttgttgtgattgtaataaggcatttatatgaccatatttttccttatccttaattttcactatatcttgttggttaaataatatgctccctttttcactttgatacaaacctagcatgagttgaagtaatgagcttttccctgaaccagaaggaccaacgattgcaacatgttcacctttgttaatagtacattgaatattggataacacattacttgattgattccaatatttaaaatctactgcttgaatatcgaataacaaattagcttcattcaaatctctttgcatttgttcggtaccttgtaccatcggatgcgcaatcacttcatttatattttcaattgcttcatctgtatcacctttatagtaggccacattactcatcggaatggcttgttcaaacaacgttaacatcatgagcacgatactcgttaaataaacgacgtctaattggtgattttgcacttggacaacacccaaatataaggtaaaaaacagtgcaatcattgagacaatatttaaactatactcatatagagataaaaatcgttgctctttcgcttgtgcgtcttcatattgttctaactgatctaacaatgctgttttatagtatgttgttctatcaaaacgaacgagttctacgtaaccttctttataatcgtaaaagtgatttaaaaaaccactttgtacttggttgacttgtttttttatttgtcgcgcttttttagcactcaaccaaggtataaccaataaagttgcaatcatactcacacagataataattgcatgtacatatgaaaaataaatcattgttaaaacagttatcgttgctgtaatgccaataactactggaggataatacactctcagataaatattttgtagtgcttccaccctgccaatcatacgcgcaatcaaatcgctagaattaaatttacgatatacatcgggtatgacgggtaataatttcttgaaaaactgaactctcacatttctcaacatcgtaaatgtcgctctgtgggataaaagtctttcgatataacgtgcaatcgctcttagaaatccaaacattttaacagatacaatcaggatcattaaagcgaataaaggcgcacctaatgcactttgtgtaatcatgtacccgcttaagaagaacatacccaacgctaccaaactaccaacgacaccaattagtattgataaaatcaaatctttgtctattttaaattgaatatgtggtttcatgttgcatcaccaccttgagatgaatttttcattgtcgtttgctcgacagatgctgcataaccattttctattaatatgcgtttatctgctttgttaattgtatgtgatctatgggcaatcgtaataatggtcgcactttcaaattcatgtgcaatcacatcttgaatggtttgttctgttttcacatctaagccggtagcgggctcatcaaagatgatgagctctggttgtgtcattaacactcttgagagttctatacgtctcatttgccctcctgagagcatttctccaccttcacctatccatgtatctaaaccatccgctaagctcagtactttttctttcagtcctacatcatctaatacctttaatattctagcatcatcaacgtcttgaaacatcgtaatgttatcacgtatagaagcattaaaaatataaggtgattggctcaaaaagccaatacttaaagatggatccttaaacgttactgaaccggattggggtttgtaattttgtgttatcaattgtgctaacgttgatttacccgcaccacttttaccaactagtgcaattttctcgccttgataaatacttagattaatatttttcaaagcataggtgtcagctgcatcatatttgaaatcaacctgcgataattgaacaatgggtgtttgatacgtatcaatctgtttttgaatcttatgttctgcggttcctttatctaagacatcaaatacgacatcacttgaaccttcactttgtttaccggtatgaaacgattgtccaagatctttaattgaattataaaattctggcgctaagataattgcaattgctgctgttttaaaatcaatgttatgaaataaaatcaatcctaaacctgcttccaatgcaaccaagccaatacctaacatactaataaattcaagcatgaggcctgataaaaatgcactctttaagatgcgcattgtcaaatctctaaatgttgtactttcttcatataatgccgcttcagtcttatctgttctattaaaaagctttaatgtaataagacctttaattttatttagaaactgctgactaaattgatttaaatatgtcattttatctttagattcatcacgtgttttcaagccaaatataatatagaaaataggaataaatggtgctgtaacaatcataattaatgcagtatttaaatgtataaaacacattgccacaataatcatcagtggaatcatcatcgatttaaatacctgtggaaaataactgttaaagaaaggaacaatgccatctatactttctgtcaacgtgtttatttgcgcaccaattggttcttttgagcgttgtaatatgagctgacgtcgcaaatctcgtttgacttttgaagccatacgattacctatcatttggttcactgtattaagtgtcgcacgtgcaattaaaatcaccaatgttataaataataaagccaatacatcttgattggtttttaataacatgatatttaaaatttcagcaatagaaatattttgaactactacggttatggctaataatgtactaataataaacatccatataggatatactttaaattttaaagctaaatttgttaatcttttcacaaaatatcacctgccacatattataaacacattatatgaaatttaaatgatttcgctcattatcaagtaacattttttatgttaatttcatatttctgacataaatttaaaattgattttttattcctctgacaaagctactaaaatatatatattttatattatctcattctttggtctcatattacggttttaagtagcgtattatatttttattgtgctattattgttagatgaaaatgcataaaatttaataagtactatgaaagtaggtaaattatgttaatacttgaattaattaaaggtattattctaggtatcgttgaaggattaacggaatttgcacccgtttcttctactggccatatgatacttgtcgatgacatgtggctaaaatctagtgaatttttaggttcacaatccgcttttacatttaaaattgtaatccaactcggttctgtgttcgcaggtgcttgggtattccgtgaacgttatttcgaaatgttacatattggcaaatacagacatgaacccattgacggtattggccaaaaaccaaaacgtttaaacttattgcatattatcgttggtatgatacctgctggtgtcttaggattactcttcgatgatgtcatccaagaatatcttttcagtgtgcctactgtaatgataggactatttatcggtgctatatatatgattattgctgatatttacagcaaaaaagttaccaatccacgaaacgtggaccaaatcaattatttccaagcatttgtcattggtttatcgcaagccatagctatgtggccaggttttagtagatcaggatctacgatttccactggtgtcttaatgaaaatgaatcataaatcagcatctgactttacatttatcatggcagtgccagtaatgcttgctgcaagtggtttatctttagttaaaaatatggaatatatccacatgagtgatattggcttttatgttttaggtttcttagccgcatttattgttggtctaattgccattaaaactttcttatacttaattagtaaaatcaaactgattccattcgctatttatagaattgtcttagtaatcattatcgctattctttattttggctttggtattggtcaaggtatcactggtgaataatttaataaaaacaggtaactcccccatcaacggggtttatcacaaactgtcgacaaagtctccgattttgttggcagtttttttgtgcatggttttcgcagacagtatcttagcgtgtaggtttcggctagtgttgctttcccaggtatcgatctaaatcactgccaataatatatagaaaataatataatatataaattgggcagtcgtagtgtttgttatgttgaataaaacaacagataataaatcctatgcatacgctatatttaccgtttattttcatgtaatatagggtatggtgaagatagtataaattaaatggaggcaacgagtatggacaaaaagcaattaattaaaacaattatcacagtagcgcctgtgtttctagtaccgctaatcgtcgaacgtaaacgcatcaaagatcatccagatgttaaaaaagctagcgatgcgacagttagcgcttctaaaacagttgcagataaatctgtacatttgaaagataatgtagttgaaaaatcttctaatgcgaaagcatatgttgtagataaaaaacacaacatggatcaaaagcgcgaacttaaacgcattgcaaaagaaaatgatccagcttatatcgagaaaaaaggcgaaaaattagaaaaagaaaatcgcaaagaagcagataaaatgaacaaaattctgcaaaaaaatatcgataaacgtcgcaaagaagaagagaaagcacgtcaagaaaatgaaaaacaacgtatcaaagatatgaaaaaatctaacaagcacatggaaaaagttggattaacaccaggtaaacttgatgacgaaactgagaaaaaaggcgaaaaattagaaaaagataatcgtaaagatgtaaataaattaagcaaattgttacaaaaaaacatcgacaaacgtcataaagaagaagagaaagtgcaagaaaaaaataaaaaagcacgtttatctgaattcaaaaaatataaagactatgtggcaaaaagcgttgtaaaacaaaacaacgaagataaaggcaaataagcaaatgacacaagtcattatagatggagatgcttgtcctgtaaccaattcaattattgaattgacgaaagggacaggcatttttgttaccgtcgtccgtagctttagccacttctctaccgtcattcaacctgaacatgtcaatattatttatgttgatgatgggcctgatgctgtcgattatagaatagtaaaactggttcactctgatgatcttgttgtaacacaagattatggactcgctagtttattattaaacaaagctaaaattgtcatgcatcacaaaggatttatatataatcaagaaaatatcaatacgctactcgaacaacgacatgcaagtgcacagtttagaaaaagtggtggtcgaacaaaagggccggctgcttttacagaagaagatgtatcaaaattcgagtctatattttcaaatttaattcataaatattttttagaaacggaggattaatcatgaaaaaaattgctatctattgtggtgccagtaaaggcaatgatgttacatatatgaacgaagcttatcaattaggtaagtacatggcagaacaaggctatgaactcattttcggtgcaggttctgtagggattatgggcgcaattcaagatggtgtattggatcatggcggcactgcaattggtgtcatgcctaaaatgttagatgaaaaagaaattacgagtactaaattaacggagcttattttagtggattccatgcatgagagaaaaaataaaatggcagagcttgccgatgcattcgtgatggcacctggtggcgctggctcactagaggaatttttcgaaatgtatagttgggcgcaaattggtatacaccagaaaccgatagccatttttaacatcaatgccttttttgaacctttacaaacattaataaatcatatgattaaagaaggctttatcgatccaaaatataaagcacttgcacctttatgcgctacgccagaatcactttttgaaacattaaacaattaccaacctcttggcattagaacttatgactaaatcatgttaataaaattaagcagctattatacacaagcactagcttatataatccgcgtaaaaaggatgactaatcgtaggaaagcgtctgagacatttatttttgtcccagacgctttttaataatgaagcattatttcgccttatccctcaatttgacaatatctatttatatcccaaacatttaatataatctaacttgaaatctatcattgaatagttagcctttgacttataacaaaattgctaagagttgttttaaaatcattatagctacgattaaaataatgactgatgacaatttgttcaatagcatgatatatttccctgttttatctatgtttccaatcatttttccaactactgccaagaaaataaaccatagccaagaaacaataacagtagctatagtaaagaccattttttcagtaccttcataaactgcaccacttgtccctattacgcctatggtatccatgattgcatggggattaagtaatgatacagacagtgcaaaaccaatttgctttttagcggacatcggtcgatatgattgtagtgtaactggacgtgtacgccataatgaccatgccatatataataaaaataccagtccaatacaataaattgtaatttgtagcacaggcatcgataacaatatcacagaaatacctatgacggctaacacgattaaaaatgtatcacataaccctgctgttataataactggtaatgatttggtaatacttttatggtttgcaccttgattaaatacaaatacgttttgcgcccctaaaggcaatatgagccctagcgctaatagtaatccgtgaacggctgattgcaacatacaaaactacgctcctttaattattacgactattttaactatgctatattatatacacagaaattggacccaccagatgcaaattaaaataccaaccagataatataggagctattttatgttcaaaccaaaatacaagcaaattatagatgatatcatttcacaaatagattctggagatttagaacaaggcatgcaattaccttctcaacgagatatggcctcgttatatcaagtgaaccgttccaccgttatacaagcactcgatattctaaaaagtcagggaatcatagaaggtagagaaaatcaacgcttatatgtatctggaaatacttggcatacttatattaaaaacaatattaattggcaaaactatattagccatagtacgactaanaataaccaatactttgttcaacaattaataaactagaattccacactaacatgatacgattgggtactggtgaactgctcnccgatcttatacctaatgaacagttcaaagaaattttgagcaagtgtcatactcctgtgttaaatactaattatgaaccacctcaaggcaaccttaagcttagagaagcagtggcacaatatatgcaaaaattaggtgtctcatgtactgttgaccacatttgtattacatcaagtgcattacaaggtttaaaactcattgcagatggcttactcattccacaatccaagattattgttgaatcaccttcatacattaattcaatacgcacgtggcataatatgagggtcgatattcagcaaataagcatttctgatattaaaagtaatattaataatatttttaaagcacaatcacaatatacaaacagtatcttttattgtataccgactttacacaatccaacacaacatagttattcaacagaagaaaaacaaaaaatcatcatgcaatgtgaacaacatggtataccgattgtagaagacgatgtgtatggtgacttatatttcaatcatgagcgacctaaacctttaaaatcgtttgatacaaacgacaatattttatatttgaatagcttatctaaaactgtaagtcctggtttacgtgtcgggtggattgttgccaagccttccgtcgcagcacatttagctgatttaaaaatgcaaaatgactatggcgcaagttctatatcacaatatatcgcaacacaatggttaacacatcctcaatatcatgaccaacacctcaaaatgttaaagaaccaacttttaattaagagaaatttatttttagaatctctgaagaaatattttagtgatttcggttcatggtcaacgcccgaaggatcattttatatttggttccaatttaagttctccatcgatatgaaaagacttttcgatgaagcgattgcagaaaacatactgattaaccctggtgaagtatatgataaagatgcgcgtgattgtatccgtttctcatatgcttatgtcgatgccgaagatatcgatgaaactttaaaacatttaagcaaaattatccaaacacgttttacgccaccgtcttcccacattggcaaaggtaatcacggttgataagtataaaaagtgcttctgaactgtggtacatgcataaatctttctaactttaaaaaattgataaaggctgagacaattaaatttgcctcagcctctatttaacttaatctatatacatttgtagagatgatcatatacattatcaaaacaacacttctcagacatttattgttaaatctttataatatctaacatgttttttcagtggatgatacttgctaagttctgggtattcaaaatgatcaaaacgtttcataccaattttttccataactttgcgtgaagcttcgttattttttgaagtgaaagcatatacttcttcaatgccttgttctttagcatattttaataccgcagctgcgccctcagttgcaaagccattgccccatacttctggaattaggcgccacccaatttcataaaatggcaattcttcaaatgtgtatttactttctttaggaacataattcaagccaacaaaccctagccagcccatttgtttctttaagttctacagcgaataatcctatgccatttgattgaatcgcttcatccatttttttcatatcgtgttctgaacgtttatagcttaataaactaggaaaatatctccgaacttgccgattggcattcatttgttgaaatggtaataagtctgtttctcgccaatcacgtaatctcaaccgttcagtttcaatataaactgtcattcattacacctctatacttaaagtaaatttatatagaaaagtaacgcgttatgagcgcactcatatcgcgttacttttttagtatttcaaagaatatcaattacgctcttgaaatatagctaattaattcaacgtttaccgcaatttcttttaaacgattgcgttcgcttttcggtgcagtaaatgttgcatcgataaaatcattctgatgatctagtttatacgtcgctacaaatgtatccgtatctgattcgaaattaggcaaatgtgcaataacacgtttaatttcacccgttgaatctttaatttgtctgccagtaatactttcaatttctctacctaattctggcaaagtaattgaacggccttctaataaattgaaatcttgttcatgcataacggtaacctctcttctattcaaggaaattgttaattcactttatctttatattcacataaacgataaaacatatttatcaattaacttgtattccaactttttattttaaatatttttatatgtgacgattaaaacttctaatatcttataacgatacccattataacaattactaaaaccagtttacaatgatttcctaggaaatactatttaaggatgtttaaataagatgatatataaattatgatgcctgataccctacgattactttatgtcttggcattaatatctttttctaagtcgtccgatttatctttaagtttgtcttgctctttttctagtttttctttttgttttttcaagtctttattttgcttttcaagtttatcgatatctttttctaaagacgctttctcatcatctttaccacatgctgttagagtaatggttgatgctattatgagtgccagccattttttcatgtaatatctcctttttcataataatatatattttatcattatttatgcttatcttcattatttaccaataagtttttgaccataacaaccttattcatatcataacccatgttaaaattcattttttgcatttttttgttcgaataagctacagtactttctattgtatacgcccctttatctcgtgcccatgcttcaatctctttttttagcttagttgcaacaccctgattacggtgagtagtttcaacatataacatctcaattaacgccgttttcagtgttttatcatatcgtgcccaaataaaaccaatcaaccgttcaccttctgtttgcatcaatattgtatcgtcactgtatcttaaaccatgttcaatcatttcaatacgcaaagcaacagaaagtttagtctttttatatgtagtattttgccgttctagttctgcttcatgcacttcagcaattcggttaatatattgtgtctgtttaattgttaatcgattcatatatactccttataaaagcttgttgatttatattatgatattagtcataataattcttatcttataaatatattctaaaaaaaggtagcgaaattcaaatgaaatccactgataaattaatgcgtgaaaataatgtgaaatcacttagattaaataatacagatagagaaacgtttgaaaattatatgacttatgtacgagctgatttaagcgtaaatccacatgcatctgaaaaaatgttaaaccgcattttacatcagttattacaggccgaaaaggaaggcaccctcgcaatggatttctttaatcatgatcctaaagcgcatgctaaaaacgaaatcaaaaagttacctaatgaaactataactaatatattcaaatatatatttcaacatatcttattatttataggtattttttgttttttaaaaggttttattggatttttcattggcgcaaaacgtttatatatttataccttccctcttatattaattgtcggttttattatcattttcttatttatttgggtaatatttaaaactgtgcaaatgcaatgttttactaaatcacattggacatggattggtacttatatcagcattatccttttattatttgcaactttctatgtattttttgttccacaatcttttttagcgataggcccttatctcttaattagtaattggacttttatcattatttcttttatcgttattccagtttcactctatatcgatcatcactttatcaataaagatgcaaacacttctttataaacagtgcatagtgataaaaaagtaggacaacgaaatcttatttaaaatatgatttcatcgccctacttttatctattatttaatatgtctatattaaatatttagtcttcttttttctcaacacgaatactcactaataagaaaatgagtccaataaccgttaataaaggtgctattaaacttaatgatgctataggtaaattcgtaaccacgacgcctcctatgaaggcacctaaagcattacctaaattaaatgcagattgattcaacgtacttgcaagtgttggtgcatcttgagagattaaagtactcttaaattgtaatgacgggctcatactaaagccaatcaaaccaaagaagaagatgcctgctaccattaaaatactattcatttgaacgaagtataataagatgaaatatagaataaagacgataaaaatgatttttaaagctttatttaaattccaatctgccagcttaccaccaacgacattaccaagagtaacccctataccaaatataattaaaagataagagattaagttttcttgtacattggagacatctatgagcacagtagaaatataagtaaagtatgcaaacacactactaaaaccaaacaatgtcactgcaagtgttagccataaacgcttttcttttaaaatttgtaattcatttaagacagatgacttaatcgtttcacgttgcataggaacaaaaataatgatgccaatcagtgcaagtgccccaataatcgaaataataataaacgtcataggccaaccaaagttttgaccaattaacgtaccaaaaggtacgcctaatatattactcatacttaatcccataaacataagtgccattgcgctcgcacgcttttcaggtcttaccatacttgccgcaagtatagaaccaataccaaagaacgaaccatgtgctaaagaggtaataattcgacttgtcatcataaacccataattaggactaaacgatgctgtaagattccctataataaatattcccatcaatacaatcaacaaatattttctattccattttattgtcaacataactatgataggtccaccgattgctacacccaatgcataaccagtgatcaattgtcctgcttgactcaccgtcacgtcaaaatctcgtgcaatattaggcaataaccccataataacaaactctgtcatgccaattgcaaacgcaccaattgcaagcatccatatcgctataggatatttcattttcgacttacctcccattacgtattttttaaacatgattgtgattatactaaaatgcgattgcttaaaacaagggtattgcttaatttttactttttttatataaatccgcttacattatatgtgtagttaaaattaatcgcacatataaaaaatgttgatcattcaaatctaaaataacatcttataaaagttattttaaaaatgaaccatcaacacgaaggtatactgatttagtttataagtaaggtatctacaaagaaccaaatcaccataataatcataatgattgcctgtgctactgagcttgctaaaaaggcaacgaccgaaccaaagctcgcttttagcgctttagttaagttaggctcttgaatcatttctacaacaagcactgcaacaaatggaactataataatgccaaaaggtggaaagacaaaacaaccaacgatgacaccgacaagtgcaaccagttcacttaactttgaaccaccaaatttatttacaaagtatttattcataataaaatcagcaacaagaataaataccgtgaataatatcatagaaacataaaatacccatgataagttgccattatgaaaaccaaattgataaattaaaaaaccgacccataacactaatactgaaggaataatgggtttaattaatccaataaatgctaaaacaaatgctgctataatacatagccataaaattactgtcatgattatctactccatactttcttctgtaaatttttgatctttagtaaagaaaatcagtatcatgccaacaaatattgaagctgctgagacataaaatacattgcctaaaccaacccattgactcatgataccacctaataaattcccacataattgaccaataaccatcgcattagcaaataatgtcgacgcataacccggaaaatctggtaatatatcttggaaatagctaatacctagcccaagtaaaattgctaaaaatatggctaagaatacttggccaacaaacatcattacaaggctttcgaataccccaatgctaaagtaaaataatccaccaaataaaccgcctaatattaatagtgtgcgcgttgttaatttagcagataaaataccgagtaataccataaatggtacttctaatcctgcacataaacttgccaaaccgccgacaaacccttcaggttcatttaaatagtttgtaacgaacaatggcatattcaacgtatacatccattgcccaatatgcaataagataaacgctaaaaatggaactaataatactttatcttttaacatatttggtgcagctgcttctacatggttcacatcggaaactgtgtgttccgttttaatatctttaaaaaagaaaacttgcagtagtaaagtgaagattataattgtaatggtgcccccaaacagccctgaataaccatttgcgcttaatagcaaagcacctattaaaggaccaaataaaaatccaaatgaaaacattgatctcaagacagcatttgcaaatttggctttatttttagacgcggaggcattaattgattctcttgccgaggcatacatttgtggcattgcaggtgcaaaacacccttgaaaaatcgcatacatcgctataaaaatccaaatttcatgaatataaaaataaatagaaaaacttacagcccccataaacagggcagcaacaataatcaatttcctatttatatttcgcgtatctgaaaatcgtgccacaatagtatttacaataaattgacttattgctgctaaagctaataataacccgtattgagaggacgtcattcctaaatcatttgtagcaaataacactaaataaggtacggtaatcgcaattcccattcccaatagcatcatattaattacaaataatttgtaattcttgatatgtaataaggcactaaacatatagccaacctctattctataaataatatgttcaacagcgtgaaagtgagtattccaatatggaaatatttctaactataagaaagttgagatggtttgtcgtttatgattcaacatattccatcattaaattgataaatgattctacttgaggtaattgcttcatactcgcatcgtagcttaaaaatgttgaacgaatcaatggtttttcatcaatatttacacgttggaattcaaattgctctcgatcgagatgtttcatcataatttcaggtaaaatcgtaacgcctacaccattcaataacatttctttacatgtagcaacttggtcaacagtaatcatcgcatgataatcttgacctatttgactaccataccattcttttatctgattaatataaattggatcagcttgaaattcaataaatggcatcttatctacttcatcattgcgatttttgggatgaataaagaaatgttcatcattgaaaagatgcgtattacttaaattcatcattttattaccacgaataatcatgacatggtaatctctatgatttgcttttatctgttcacttgaacctacttgaacttgaatttctacgtttggaaattgtcgtgtatataagtttaaaacttctggcaataatgtttgtccaattaaagatgaacaaccaatcgatatcgtaccatttacttcgccaatatgcgcttgcattttgtctaagaatagacgctctctattaagcatctctctagcatgctcaataatcattgcgccttcagtagtcgtaatcaattgtttctttgttcgaataaatacatttacgccaaaagcattctcaatggcctttagacgttgcgtgactgcaggttgagaaatatataatatttctgctgctttcctaagtgttttagtttcatcaagcgtagttaacaagcgataatcgtctatcttcataattatccccctattttttatgcacgtttctgtagccgcttccatttcattacaacatgttttccattatgcccataatgtaacctgtaaacaaactgactcatacttcaatacgcacgttttatctcaatatttcatttcatactaaccacaatcaccttttcagttcgtcctcgctactttcactatagttcagcaattaaaataaataaaagacattcaagttatgtttcaaatgtcctttattctatgtgtatggttcactataacacgtttttttaatgactcctatcctatttttcaaaggactacatactgcataatgagcgattaagtttgttatgcatattaatcagtttctaattttctttggatctagatgaagacttctgactccattgttcaaatgtaccttttttatgctgaggttttgtttcagttctttcatttttcgcctgtttgatgtgtttttcttgtttgtgcgagggcttatgcttgtgtgttttagctttatgatcttttggtttatgctgtgcttgcgtttttgtaacaccttgcttatgttgctttgccttttgtttaattttataaaagcaatacataatcttatcttgcatcgattgaaaatcagcatcaattttaatcattaattgatgtgcaatcacataagcttcgtgatactgctttctcgtaatttgccctgactctaaagcgcgttctaaatcgtcttggtctacaagttcatattcgccattgggtaatacaagtacatccagacataaatcaattgtgcgtgcattacctttttgtgtaacattttttatatttatatcaaaataatattccaacggattgcccttgtcatctaacatcactgtaatactatagcgctttttctcaggtaagatttgtaaccattgatagttatcatcagcaacaataatattttgacctacaactgaaacctctaatggttctcgtactttattcattgtgaccaaaccaatgattcctttgaacttattattgttcaccttgacctcagtatattctctatcaatgatgcgacgccagtgacgcttatcgatatattttactttcactgtcaccaactccttaacattattatataaaactgtcttctttatgtcatctcatgaattatattgtcagcattcaatttgcactgcagaaaatttgattattattattgtactatacttcatagcgtaaaagcgaaattgacaatctttatgaattctgttaaattttatctatatttttctgaaaattctataaataaaggagatagaaccatggcagttattcaaagaccatttagagccgatcatgtcggtagtttattacgtcctgaacgcttaaaacaagcacgccaggattaccaaaacaacattatcgatgcacaggcattgaaacaagttgaagatgaggaaattgagcacatcattgaaaaacaacttgaaattggattacatagtatcactgatggagagtttcgcagaagttggtggcatttcgatttcctagaaaatttaaatggcgtagaaggttatacctcagaccgtggtttagaattcgaaggtgtagagacacgaaatcacaatgttaaaatcattagcaaagtacaattcaatccagatcatcctcactttgagcatttcaaatttttacatgacaaagtagatggacgtgctacatctaaagtctctataccaagccctaatcaattatttcatcctaatattttaaatgaagagatttatccagatatcgaagactttgcgcatgacgtcgcaaaagcctatcatgatagcctacttaaattttacgaattaggcgcacgttacattcaattagacgatgtttattgggcaaacctaacttcaggtacacaaaagacgcgtggtcgtgatcgaactgaagaagaaaaagaagctgcacgtcaacttgcctatcaagttgtcaatgaagctgttaaagatttaccagaagatttactcattaccacacacatttgccgtggtaactatcaatctacttgggcaatttcaggtggctatgaacctgtagcaccttatttattccaagaacaacttggtggatttttcttagaatatgatgatgaacgttctggtgactttgaacctttacgtttcttccctaaagacaaatctgcagcagtgttaggattatttacatcaaaaaatggtgatttagaagataaagcaacgattcttaagcgtattgaagaagcacaaaaatacattactttagatcaaatatgcttaagcccacaatgtggctttgcttctacagaagaaggaaataaattgactgaagacgcgcaatggaaaaaattagcttacgttgtcgaaattgcaaatgaagtctttggcactgcgaaataattttaaatatcttgtcttacccaaatacggtaaatgaagagattgcatattaaaacaacccattttatggcgatgtgatcttagatatatcataaattaagctacgcatttcttgaatttcaaaagaaatgcgtagcttattaatgaagcaacgtttctttaaataaatgagacattacattttcaattcaatcatctacagcttaattcaaaaaagagtctggggcatctatttatgtcctagactttttcacttatttattatttttttctatttcatctgcctttaaagcatagcgttcatttatctctgttaattctggataatgtttatctagccactctttactaagcaattcaaaatgttcaaattcaaagcctggttgacacatacagccaaccaaagcatatgcattttcatcttctacactagatgcaaaaatcgtacctttaggaacgacgtattgtaatacgtcacccgcttcaatatgcttacctaatgtcaccttttcatattggccattcggagaaatcatgtgaattgtgagtgaatcaccctcatgatgataccaaatttcatcagcatcgatacgatgaaaatgtgaaatattatgataagttagcaaaaaataaatacttgtgtaagctgctctatccatgtctttatcatggttacctttgataacttctttataatagccaccttctggatgcggttgcaattctaattgtgaaatccaacgttgtactgtttgttccatactacttcaaatccacattatggaatacattttgtacatcgtctaaatcttctaacgcttctactaatgtttcaaatgtttcttggtcttctgctgataactcaatatctgtttgtggtaacatttcaaattcagctactttaaatgtatcaacgcctgtttcacgtaatgcatcttgcacctgagcgaattgatccggttcagcatagacaatcgttaatccattctcatctataacatctctcacatctatatcttgttccattaatgcttccaatatatcatccgctgatttatcttctataccaaagactgccgtgtattcaaacatatacgcaaccgaaccagagacacccatgttgccaccgtttttaccaaaagctgcacgaacatcagatgctgttctattcacattatcagtcaaagcatctacgataatcattgaaccacttggaccgaatccctcgtatcgtagttcgtcgtagttctcttcaccagaaccttttgctttttcaatcgctttttcaataatatggttaggcactgaatatgtcttcgcgcgttctaaagttagacgcaatgcttggtttgactcaggatctggttctccagatttagcagccacataaatttctttaccaaatttagcataaattctacttgtatttttatccttttcggcctttttttccttaatattattccatttacgtcccatatttccatctcactttctcaataactacattgattaacatgttatattatacaataatttccacagagaatatagatgtaagcccataacatccattttgtttattcaccttatatactaaaaaaaaggcgtgggtttacctgggctaacgctcacgcatatgtctcacaagcatttttacgtgtcatatctatgttttagcttatgcataaagacgacgctattctataaaaatagaaacatcttttctttaaacaagtgagaacattgcattttcaatatagccatctactccctaattgaaaacgagcccaagacatctatttatgtctcaggctcgtcgttatatttatattctattttcatataaaaatttcgtgttaataatgaatgattattttacatatgcttcaatatcatcaagtagagtctcatatttttctgcgttgtcgtcattcataaataagtagactttacgttcatcttctgttgaacgtattttacttactctgtcttgatcgattaagcgacggatagatgcaagcaccttcgttctactcaactctaattccgttgttgcaatttttaaaaatggttgcattagcatattttgattcctacagttatgtcgtataagttctaagatagctacatcattcattgttaacttataggtttcttcaacgtaatgcatcacacgtttatactttttataaacatttaaaaattgcgcttttttctcttcattcattgttgttacacctccaaatgctagtaagcaatacaatataattatccataaaatgtaattgcttgtccttatcatttgtaattataggtttgtcaaaattgcgaacaataataaattaagtttcataacgctttttcaatattgcattttataaattttattatgtgttgatcatttatatatatatcaataatgtgcactgtattataatctaaatttaatgtcaaagtttcttcttcaaaatgatgctcaaacacactgaattcaggtttattatattcatctattttcttaatacattcatttgaccattgataatggttacgtaagtgctcaggaatcgcgtaattaatattaccgtacacgttgcttatagtttcataaaaaataacataagcacgtcgcaacatcatatccttaaagttgatatgaatttggatgttttgttcttcgtgatctaaagtattttcactctcaactacacgccagtcacccacaaaaattgtgattttgtgtgggtgatgtgctaccgtataataatcatattctttcacgctagatttactcttttccattaatctttcatatatattacctagaatagaacggaatccatttctatcatataaatacaatgcatgtttcttatcctcttgtttaactaaatctataccgacaccaaagaagtttccacgcgctttcttaaacatactcatcaataatggcggactttctattaactccatatgatcatcatttaataaaaaattattatgaacatttaaaagataatattttctttcttctaactgcatttcactcattatttttttaatattactgaatttaaacacttctttggtaagtaactcttcatgatcttcattaagataagatgatgctaatttatgattatcaataaaatagtaatcaaatccaatgcgcttcaattgaggctccatatttttaaacgcttctggctgattgaataaatgtgtaatatcaacaccaaatttcacattttttctataacgttgtattttaatgatattgcgatatatttctttaaggggcatcgttgaaagatcaaagacgtagctgaccgagtgcatgctatcttctaacaactcaggatgtgattgtacatatgatttgtattgactatagatctcatctatataaatattcacttcttcatctgtttgaatttgaaatgctatattaacatttatattcaacacaaattttataaaaccgcaatccacatctgttgtaaaagcacctcgtaatgattcaacatctatcatgcaataaactaatactttttgtgagccttcaaagatatagcgcatactttggttatcaaataaattacgaaattcttctaaagaatggatttgaatgacgattgcatcgttgttagattctgccatttcattgatatctaaacaaatataattattttggacatttagtttctgtaattttttggcaatgatttgttgcgtttcctcaaagttttgctcatcgtcttttgttacaatattaaagactttatctgattttgtaagttgtcgatattctttaggtgaatatccaaaataatgtttaaattttttactataactcgcagaactactaaaaccataagcatctgaaatttcagaaatcgtaagttccccgtctaataatggaccgattgatactgataattttaacgtgtctacataagttttaaatcgcatgcctaatgtattataaaattggcttgatatatttgattgtgatataaacactttattggcaattgctttcaatgttagtcttttatgtaaatgtgtatttacgtaatctaacatttcacctgtaataccataaaatgaataatctgtttgttgttttaaataattaacatcaatcttagcttctgtcgcaataatatcaacgattttatacatataagtttcatatagttcatttgtcagtgtttgatctaaatgatgctttgctaaatttaataaagcttcaaataatttgctcgaagattgtatcaacttagatgtatattgatactcaaaaaatgaatatcctcgttcatgaaaccaatcactagaaatatataataatagcgacatttcgtttcttttgattctaaatatttctgtattattcacgataagaaaatcttcttcaacttctacatttgttataaaatgctgtacttcaacggcatcctttaaaggaaataataataatataccgtctgtcacgcgcttagtaggatacttgtgcttagaaataatatttaagcattgcgctttcataatttaacctctttcgaatattgtcataggctatgcattaaacgctcacttcactattaattctagcttaatcacgtcataccccaaatatttcaattaacatacttttagtctttaggtaattttgaataaaataattaattttgtcaacatttttttgtattaatcgaactaaattttaaaatacagctatagtattattaaacttttaaatagttcacaaaatttaaaattacactagattttaaaaaaacacccttataaattactgtagaaagtaattttaagggtgtaataatattttttggattatatatatactttatttaactattttctcattctgttggcaagtcttaatacatattttataatatgaagtaagttaataaacaagttgaaacccatttctctcggtgagaactgaccccgtttcatgcggttaaagtcatataacgtatagagtaaaaatagcaataatcctacaactgtaataattgtatggaaaattggattctggataaacatacctattaaacttgcaacaattaatgcaatgagtgttacaaaaaggtatttacccatgctcgctgcatttccaataacgaaaaatccaatcaatccaaatacaataaaggcagatatggctaatataatattcttataaaaaacctctggccctaaattctgtaaatacgccgtaaacgttgcataggatagcaacccaagtataatggcatagatatgagaaatcacaagcccatacttacgcgctctattaaaaattaaagttattaatactaaaccgagcagtacaaaagaaagtggttgtctccatgacattggtaggtattgtccaaaataacaacctattccaaaaataatccaataatatacaaaaaagagccaaacttttccgtatgcatgtgattttgattgttctttagtctttttttgctggttatttacatgttgtgctgtttcagccaacgcaatcactcctcaattccaaaagctactataaataaataaaatatatgcgtttaatcataacattaaacgtctatattaatagcatgtactttttaaattttccacaaaaataatgcgtaatactttaatgttcacgttttttcaaataaacaaacattgaatatacaatatttttaaaatttattatttatagacttttttatatccgcttatgttacatttgaaataaatatcatcttacttgaaataacagaaagacttgtaaatggcgcagtaaaagtatttatttcatataaacatggcattacgaaattttaataatattacatcttgataacaacgtacacaaagcaaatgatttttgttagtatggaacgtgaattcagattaaaaacactaacgaatatatttaatacatatttacggttagatatataggaattgaaggaggagttcttttgaaaaagttagcatttgcagttacagtagcttcaggcgcggcagccgttatcgccaatcatgaagccgatgcgtcaacacaacatacagtaaaatctggtgagtcactttggtcaatttcacaacaatatggtgtttcagtagacgaaatcaaacaaagcaatgacatcaataacaacatggtattcccgggacaagttattgaaattggtggaagtagctcacaagaaagtggatctacatcaaataacacttcaaatggttcatcacatacagttcaatctggtgaatcactaaacattattgcaaatcaatatggtgtgtcagttgatgaaatcatcgcagctaataatttaaatggatatttaatacatcctaatcaaacactaacaattccaggtactacaggaacaggtggttcaggtggaactgctacagaaacaccaagttcaaatacaggtggttctacagcaagtgatgctaacctatatgactggggacaatgtacttggcatgtatttaaccgtagagcggaaactggtcaaccaatcagtacttactggtggaacgctgatcactgggctaataatgcatcagcagatggttatacagttaataatgcacctacagcaggttcaattatgcaaaattacgaaggacctgtaggtcacgtagcttatgttgaacgtgttaacccagatggtagtattttaatttcagaaatgaactataatacaccaccaggtacagttgattaccgtacaatcccagcttcacaagcttcaagctataactacattcactaaatatatattcaagcgagtctgggacataaatagatgtcacaggctctttttcatttaggcagtagatgactgaattaaaaattcgcttatatcaagcttttttcaatcctagtcatccttgccgaggtaggaatacgaaatctctattagaaaatttgatttctgtcccactcccgtttttttctcctcttatttattattaatattcccacctatgcgccctatcgctgtataaataaaaagaacgagcagataaacacaattgttaaacaattggttttcgctcgttcttttagtaaatcaattgatatctatctaatgtatgtaaataccaatcaacaagtgcctatagtgtaagaaaattactatctataagaaaatatttataatgtagtaaataattgctgcaacaagtgcagaaattggtaatgtaattacccatgtgataatcatacgttgtgctgtattccatttcacacctttaatacggttagatgaaccaacacctagaatagatgaagatacaacatgtgttgtggataatgggaaatgtaatgatgatgcaacaaatattgttaatgcagatgataaatctgcagctgcaccattagctggacgtattttcataatattaccaccaactgttttgataattttccaaccaccaacagctgtacctagtcccattgcagtagcacaggcaactttaacccataattgcggttcaacgcttgtacctgtttgaatattagcaactattaaagccaatgtaataatccccattgatttttgcgcatcatttgtaccatgagaaaatgattgtagtgatgctgtgaaaatttggaaaaatctaaagttacgattagactttgtaagatttgcatttttaaatacaacttttacgattgaatacatgataaaaccaacacaaaatgcaataatcggtgatacaagtaaaacaacgatgattttcgtgaatccttcataatgtaatactgcaaatgaaccttgcgaagcaattgctgcgccagcaatagaaccaattaatgcgtgtgatgacgaacttggtataccataataccatgtgattaaattccataaaatagctgcgataatggctgctaatacgacaataagaccattttctaatttaaatgggtctacaatatctttcgtaattgtccctgcaaccccagtgaaagttaaagcaccaataaaattcatcactgatgctaaaagtatcgcagttctaggcgttaaggcacgagtagaaacagcagtagcaacagcattggctgtatcatggaaaccattgataaagtcaaatataagtgaaaaaataacgatagctactgtgatgatcaaaatatattccataagttaggactccttagctatttttcatgattattgtttcaaaattatttgctacggcttgacatttatctgcaatctcttccatgctttcatatatttcttttattttaataagggtgattggatctgtttcactattaaatatgtgtttaattgattgacgtaaaataccgtcacaatttgtttcaaattcttttatgttaatagaatggatacgcatatgcgataattttttctctacaagcaaaccaacagctaatttcatttctgcgattgctttttggatattatctacaaattcagccatgtattcatctgtatattcaatagaatacatttcgaacatacctgatgtttcttcaattgcatctaaaacatcatcaatagcgttacataaagagaggatatcctcacgttcaattggtgtaataaaagtttggtttaagtctgaaatcacttgatgcattaattcatcgccgtgtgattcatacgttttaatattgtctgagtatactttaaggtctaaatgcgtattaaactccattttcccaaattcaattgctgctctgtctaagttgaaaaccatttcttcaagtttcaccatgaacttatcttttttcttgttaaacattcaaaaaatcctccatttacagcgattgtcctcaatcaccttcaataaatttaaaaaaatttaaaatcctttaagacaaattaagattggcaagatttacaatttgctcattttttgccagtataacagcatttgttaattatatgtaaatgagcatttgcttatattagtttaaaaaatctcacaaatgttgatttatccttatttgaaaatagcacaaaatttacaatactacaattaaatttacaaattcttaacatttcattttcattaatttaataaaatgattttcatacattatgaatacagaatacatctctatcaaaaatgatgatttgtacttatgctttataatatcgcattgtatctaatgagatttttaaataaaactcacattagatataattgcacatttacttttcggattcaacaattacttttataaatacacaaatgatttcatagtttctgttaacacttcatttgtacacaatgatgctttcaataaaaaattgtcgacaaatatagtcatttgccgacaatgcctctagattatatataagcaacgcaatctgatattgctacagtataagatgaaattctttttttaaaatttgatgtcaatctagtctcataagtaacgcttatatattttgtgataattttgctacaatttcattttgattcgggaaaataaatttaactactgttcctttatctagttctgaatgaatacgcacgcatatgctcagtttttctttaacgtgattaaccaaatataaacctaaacctgatgatatcgtattatttctatttgaagtagacgtaaatcctttatcaaaaattctaggtaaatccttttcactgatacctttgccttcatctttaatttcgagtacaacgtgtctactttcttttaatgcacgtatatgtatcatactttcttcactatatttaacagcgttagataacacttgtctaatcatcatgcgacaccactttgtatctgtatatacattcaatgtatcctcaaaatctaagtcataaccaatgcctttagactgactgatgtatcttgtaatctgtatttcttctattacaaggcgtttcaatggcacatgttcgaaatacatatctttattctgatattcaagtcgtgttaaaaataactgtctatctaacatatcattgatacgcgaccattcataaagtaaggcgtgcttcctagataaatcttgttctttttctattaacagtttcattgctgttacaggtgtcttaatatcatgtacaaaatcagtcaacgccgcttccgtagattgaatttgttgcttttgatgtgtaactaatgctttttgattcgtaatttgtccatataagtaattcaccatttcttgttgaaacggtgtgtctgctaatgatttatgcttcaaagcttctggttctatattttcgtcaagatgcttataaaatttcacttcttttaaataagtaaatattaagaacaacaccgataggcctatatttaaaataataatatataaaatgctatatacactaatatcataatctaaataagcaatacctaagaaaatgaaatgcagaaataatagccatagtatccaatatatgcgcgagcgtaaaaagataaaaaaccattttaaattagccatgcgccatatatcctttgccaattttcgtttcaatggcatcattcatatctatatctgctaatttctttcttaatctattcacattaacggttaatgtattgtcactaacaaaagcttcatcatcccacaacgcagtgatgagtgtatctctcgtaacaatttgatcttgttttttcacaagcatttctaatataatcatttccgttttagataaatatatttgatgatcctctttatttatactatcttttgataagtctaatatcgcatcttgccatgatagcacacgcttttcatctaagctaaattgatagacacgtctgtatatggcttggagtttcgctattaatacattggtattaaatggtttttgaacataatcatccgcgccaagttccatactcatcacttgatccattggattatccctagatgataaaaataaaatgggtgtattagagacttccctaatttttcttgtccaataaaatccatcatatttgggtaatttaacatccataatgacgattgcgggattaacagattcaaatttagtcatcacatcattaaaatcatctataccatttacattgaaatcccattgttccaactcttcacttaattctttaaataatgtcatatcatcttctactaatagtatatccataaaatcacctttttattttgtatattttatatcttcacctgactggattcgtccattaaaatgcttaattcgacaatcgatttcaaagccacgcagcattaaaccttggaacggcgattgaaataagtaatacacaggccaaactaatttaggtatatagtcatatagatgcactaagacagtttgtgtccctttcagcatacggaactccagcttaccttgctttattacattggccttaacaatagaaccacttactaaatgtagcacaatcatatcagattcgacttgcattttatgaagtactaacacaggtttctgcttatcttttatgtagattacataattatccttgtctttgtacgcatgcagcatcgttccttttgtttcatttaaccaattaaaataatattcaaccatttggtctaatgtccaattcatcggtaattgaatactcaacgcactgcgtacatcatcatatttagagacttgtaattcaactgccacatgtgggcgtgaaacgatcgcttccgtttgttctactggtacaccgtatgctgacaaacgttgaatggtttcatgatcaaatcgactaccgctaatataaataattttacctataccgttctcagcagccgcccttccaaaattgtcagaagcaattaagtttaaatctcttgctgttgcttgtgttaatttagctgaatgtttggttggatccaaataataaatggcaatatccatgtcttccatcgcatttaatacatcatcataattataaatatcttttttcaaccatatcacttcttggaaatctttctctttaggatatttggataatgtatatagattgccttcatcttttatagaatgaatcaaggttttccctatataacctgtgacaccagcgagtaaaatattgggcttcataagcatacttcctttttattagtttgactctatttaaataatacctagtaatatcatgctaatgatgttaagttatactataactgagtattagcaaaatagatataaggagtgttcatacatggttcatcaaatacgtgaaattggtatcaatgatatagatccatttgtaaagttattaacgacaatttatgatgaatctgattacttaatatataatcctggggaatatgcaccgtctaacaatgacgccattgcaaacttggaacattacatcacatcaccttctaacgccatttacgtagcagagaataacgatgaactcgttggctttgctattgttacgacaggtaattttgaacgcacgcgccacgaagctatattttctatgggcgttatcagacattatcgagagaaagggctcggtcaatcattaattaactctgttgaagcatggtgtttaaatcatcatatccgtcgtattgaagcttcggtcgttcctgaaaatgaaacagcagtagatttatttaaaactgcaggataccaaattgatggtgaattgcgtgacaaattgtatatagatggtaaatactttaacaaatatgtcatgtcgaagttactactttaatttacctctcaactatttatctaaacgtcgcttatatataagtttattgtaaatgaaaaacatgtcaaacagtaaactaacttcactattattgtctcaatttcacattgtagcagcagtaatgcgcgtaggtgtcagttttttatcattctctgttagattaacctgaaagaatggaacttggtcatcttttttagttaagtagaacgtattatctaattactaattgtcttgtctgttgtactctaactcatgttatatagtaatttataacgtattgatatatgtggcaaagtgcatacacaataaatgagctactcgaatcgtatgataaatcgtaaatattgtaagttattaaaataaaaagctaatccgataaacggattagcttttttgagcatagtcattggcaagctctttagatttacacttaaatcttcaacatacataccaatgtatatgatgcattaatttattaatatggatttaattcgataccattaggattcgatgtttcttcatccacttcagtttctacacctgaagaacttgtatttctacttaagaaactttgcacttttttcatattttgtttcgattctggtaactctaaatggaattgatattgatgtcttaaattgtgcgttccatcataaaatagtttatctgtaggtatgcctttagattttaattttttataaaactcaatgttttgactataaaacggatctgcatcacctactgataaaaatgtaggcggatagtcttttgtaacttgattaatcgtggacatttcactaatatatttaaactgtgtctcccagtctctcttaccagtataactttccataaacagttgtatccttggaaattcagtggctttaacagttttcatatcgtaaaagcctccaaagaagattgctgcttttattttatctggttcaaattgctgttcaaatcccatattatctcttagagatttattcgtttgcatcgcagtatattgacttgatagctgagcacctgctgaatcaccaccaaaaatcacttgatcaaaatccataggtaactcatgtttattttttttaataaattgtaccgcttggtcaatttgatgaagttgcgttggatatttatagtcaggtgcaagtgcatagttaatatttactacaatatatccctgttcagcaatttttgatagtaatggattcttatattgtttatcccctgctataaaaccaccaccatgcatccaaaatacgaccggcaatttattatctttatctaaatcagtaggcgttaaaatatctaatctactgtttggtacgcctgtactataagttatattggtaaatgcattgacatttctattattaatttgtactttttcttttatttctctagaatgctgtcgatcatactgctgttttaacaacaacgcagtaactaacgctaccacaataaatacaatcacagtaattatcgtccacttgtaatttttcttcatgcatgacctttcctttcggaagcattgtaccataattcatacagtagtgtgaattggctaacaaatatagatgaatgaaaaagtctgagacatcaataagtaagatgcctcagacttttactcaatgggaagtagaaataaagtcccttccctaatgataattatttaatatatctttttatttaagcaataaatttcttgttctgacgttttctactatagtatttcacaagtacgcctattacaacaactaaacctacaacacccataattggatataagaagttgataagaccagcgaaacctacaaagcttaatgcgaatgcaacaattaccataaccacgataaatatgtgatattttttactatatggttctgtaaatcttgccgcaaatgagtacattaaaccaagaattgtgttatacattaccgctaacataatgatagataacactaaaccaatccaaggatggatatcattagctaacgttaacattggaatagatgcatcttcgatttttgtaaattctgattgtaatgcaaagttgataagtgctaataatatcgtataaacgataccaccaaataatgcacctgcgcctgaaactctacgtctcgaagcatcgccaccaattgcaacaatcgtactaaacccaactgcaaatgctaaaccaccatagttgataccatataagataccttttacgagacttgcatctgggactgcgtcattgacttcaccaaacgaaatacttccattaaataagtaatacgcagcaataataacaactaaaattattaagaatggtgtgactacgcctaaagcacgtacaattttgttaaagtccattaataaagtgatataaattacaataaccattatcaatgcacccaaccatgttggtacgccaaaactttcttcaaacgttgatcctgcgccagcaagcattgtgactgaaataccaaataagaaaaatattaataagtaatcgacaattttactgaacttatttccaaataagtaatctaaagtagactcatgattttgtgcatcaaaagcagttccgattttcgcaacttgtctacctataaatcctaaaatcagacccgaaagtataacaccgatgtatgaccataagccatatggtgagaagaattgcattacttcctgtcctgttgaaaagccggcacctacaacgataccaacataagcgaatccaatttttaccgcttctttattcaaccccatgtaaatttaacctcctcatagttaacacattgagttattataacttactgaataaattttgcaacagcacaccataaaatttcacactatacattatttttaacacaaagaaccaagtgaaacacattacagataaatgtagtttacttggttctatttaaaatagattggattatttgtcaaaatctaatatttttaatacttcacctaaattaactaactcattaatgggcatttttaaaacgatttaactcgttaaattcaacaaccacattatccatacgtttagcagtttctttaagcacattacgcgcaacactattcgtaggatctaatttaagtatttgacgtgatacatcgaatgcttttttatcagaaatgactggttccggaactgcatataataataacatttgtaacaagctttttacttctttgccctcagtgatttttatggatgcttctgcgtgataaaatgcagaatccaaagccccatggagttcacttaatggatagactaataagagaaacgctaaatcgtgcatttctgccgtttcttcttctttcatcatatctaaaatacatgtataaaacataatattttccacttcatgagcacttgaaatataagcttcttcaaattccataaaatctgactgggacattaaacgtttgactgactcaaattcgccgtttaagacatgcttttgtattaaatctttcatggcaatgtcctcctaggtatccagatttctataacagttagcttttattctaccataatctatctctatattcatttaaaaaagaagttttttgtcaaattagttgctaccttcatatttaacttactttttatagtttttaacaatagctatgcgcattagccaaatgttttatttaacgcttctatggtctcatcaatagatccaccaactgataatttaactgctgcagtaaaactcccttcaacaataggtgcatcaactttctctactcggtgttgcccttcatacatctcaattgctaaatctaagttcatttctgcagacccgatatcataaaaacataacgtatcatcatctacttgattaattaacgcttgtatatggtcatatgacgtgccgatatcatcgcctacaccaccttgatcaattactgtcacacccggtgccatttgttttaataaatcttttgtaccagccgcaattgctttactatgactaatgattacgatttgagtcattatgattcatctccaatcaatgcatttaaaatgtaaacactactctgtgcgcctgggtcaacgtgtcctttcgaatcttccttgaaataggaagcacgtccttttgtagcttcaatatcttttgtcatatcagcatatgattgcaatacatcaagcgtcaagttttcaccttgttgtatggcttgattagcacgttcgataacgtcaaacatggttttttcatttaattctactttgcctctttgcgcaatcgcttctgaaaatgaatttaatagtgcttttaaattgtcttgatcaatttcttcattgaccacttgagacatttttacaaagctgaagccatacaaagggcctgaagcaccaccgatatgagacattaaagtcattccagtagactttaataaactttgcatagagctgtcatcaatattatcaggtaaagctttaaagcctcttaccatgttaacaccatgatccccatcaccaatagctctatctaaatccgtaagtagtgtttctttttcttcaaatacttctactaattctaataaccgtgctttgagttcagagatattcatgcttccactccttcagtttatgttttaagatattttaattaaaataatgacttgaggttggcgtattgatcgcagttaggattgcttctgaattcggtactagcgttaacgaaaatccttgcatatctaaagctgtcatataatcgcctactaaccattgagcaaccgttttatcgtttttgtccatatattcagcaacgtattttgccactatattaagctctgaaagcggcgtggcgcccatgccattgaccattacgatcaaatcatctgattgtacttctttgaacaattcatttaataaacgttctacaatgttatctacggtttctattttttcccttgatagacctttctcaccatgtataccgatgcctatttccatttcatcctctgctatgtcaaaaccaaattgacctgttgttggtaccatgggcgctgtaatggccataccaatcgttttaatatttggtaaaaaatgctctatcttttctttgatatctgataatactacgccattctctgctaagtgtcccgcatatttatgaacgagtactgtacccgcaacacctctacgtttttcttcgtcgcttactgcaatatcatctttcacaaccactgtttctacgtgaatgtcttccatttcagccatttcttgtgccatttcaaaattcataacgtcaccagcatagtttttcactactaataatacgccatcaccattgtctacagctttaatcgcacttaatattttatcaggtgttggtgatgtaaagacttcgccacaaactgcagcatccaacatgccttgtgctacgtaacccgcatgtgctggttcatggccactaccacctccagaaacaatcgctacacctttttcttttttatgttttctaacaacaacggtatctgaaataatctcaatttctttatttgtgattgaaagtccatctaacatatcatttaaaaaatgtgttttttctttaatcaattttttcataacgacgacctcctcatttatctatttattcttagtataccccactcacaaatataaacgctaacatataagtgttgattcttctaatttttccaacattatggttaccttctaaaattgagcataaaaaaacgaatacttgtatcaacttcaacaagtattcgtctcaatatttcatctattaaactgattttgttttgtacattaagtataagaaataaggtgctccgataattgcaacaacaattcctgctggaataccagatggctgtaagataacttgtcctaaagtatctgccaagacaagtaagaaagcaccaattaatatagaaattggtaagaacaactggtgtcttggtccgacaattgatttagcaatatgaggccctaataatcctataaaacctattgcacctgcaaccgatactgcggcagatgaaagtaagactgcgacaagtagaaggataatacgttctctaccgattttcacaccgacaccttgtgcaatatgctgatgtgtattcaataagtttaagacattcgctttaaatagtaaaaatggtataagtacaataatccatggtaagaaggcaataacaaatgcccactcatctccccaaatattaccagcaagccatgaagcaataaactctgattgatcttcatcgaatgtagacattaatgttaatgaaccaccgcttagtgctgaggccataccaacaccaactagcaccatacttgcaggcgtaataccttcacctttgttataactgaatgaaaatataatgagcgcagtcagtacgccaccgatcatacttataatagggaggacgtaaacaaaattggctgcatcaacctgacctacaactataaataacgcaataacaaagccactacctgcattgattccaagaatacccggttccgctaatgggttcttagttacactttgtataatagccccactcatagctaatgctgcgcctgctaaaattgtaataatcattcgtggtaatctaaactccatgagtattaaggtatctgtataggctccttgaccaattagcgtcttgaaaaacgtgccaactgacatcttatactcacctgaagtcatactccaagcacatgccaacaatactaagatagttagaatcaccattgtgatccattgtttatgttttaatcttggatctatcatgagaagcgtccccctcttttaactaagtataagaagtaaggtacaccaataaaggaaataattgcaccaactggagcttctcctaacatacgtgcaactgtatccgcaacaagtagtaacaagccaccaacaactgccgtaagtggaataacacgagcataatctgttcctactaaatatctcactatatgcggtaccattaaaccgacaaatgctatttgaccaaccatcgctacggctatacctgccataatcatagataaaatcaacgtaattgcgcgcgtgaatgctacattttgaccaaggcctttagcaagggtttcgcctaaatttaatattgttaattgcttactcattgaaatgataatgacaagtgcaattaaaataaatggcgctgcccacattaattgattccaagtcgtacctgaaacaccaccggcactccaaaacgttaaactttgatttaatctaaataacaatgcgacaccttgacttaatgcagtcaatagcgcactgacggctgcacctgctaatataatacgcataggattaaacccatcacttcttgacctaccaatcatgagcacaataaagccacccattaatgcacctatgaatccagcaaacatcataacgataaatggtgctgtcggatagaatgcaaaagtgagcgcaagcatgaatgaagcacccgaattcagaccaattaaactcgggtcagccaaaccatttttagtaacaccttgaatgactgcacctgaagtacccaatgcaacaccaactaagattgcacctatatctcgtggtatgcgtatttcacttatgatattatgttgttgatttttagggttatagttaaatattgcttcaaaaatagtcgataaatgaattttagcatcaccaaataagattgaagtaatcaaggcaacaatcaatagtagcactgctataataaatgtcgttgtaaaattcaacttcccttttctctttgtagtcataaattacccctaaacctcagaataactttttctgcataaatcgtatgttactagcataggttttccagttcttgggtctgtactaatctctacatcaatattaaacactttttctaaaatatctttcgttaatacttcttcagtctcaccagtcgcaataatatcgccatttttcatagtgattaaatgatctgaaaaacggacagcctggtttatatcatgtaaaaccatgataattgtacaaccctgttctttatttaattgcgtaatcaattccaagatttctaattggtgagaaatatctagatatgttgttggttcgtctaagaaaataatatccgtacgttgagctaaagccatagctatccatacacgttgacgttgtccaccactcaagtcattgatagaacgcaatttaaaatcatacgtaccagttacgcgcattgcccaatcaatttcctttttgtcttctgcagacagacgaccaaagcctttttgatgcggaaagcgaccgtatgatacaagctcaccgactgtcaatccatcagcaacttctggcgattgaggtaaaatcgctattttctttgcaatttctttcgtagaatgtgaatgtatgttttcaccatctaacttaatttctccatttttaaccggtaataaccgtgataacgctttaagtaatgttgatttcccacaaccgtttggtcctataatagaagtaatttttccatctggtatgtgtacatctaaattattgacgatgacattatctccataacctatagtgacctgttctccttttaagcgattcataattccccttcttcctatagcagtaggcatcatagcctgtttattcccttataaattttatctattgacttataaattttccatattttttaaatgataatcattatcatagatgtcattatatcattttttaaacctattgactatcaaatgtttttatagtatttctttactttataatctgtttatatctatatactttttattttcagttgcttataagtgcgtttccaggggagctttttaagcaaaataaatagcctttagttatgaattacttcataaattaaaggctaaaagtgaattgatttatttttaatgttcgtcgattaaaaaaccattaccatatacatctcgtacatcatgtatcactaaaaaggcgtcgctatctatttttctaattaagcgttttgcacgtgtgacctgtgtcttagttattacaacatacaagatatctttttcttgtttagaaaaatagccacgtccatttaaaatggtaagtccacgtcctacttgctcatctattactttagcaatttcatctggctggcttgaaataatggtcattgcttttttcgtattcaaaccttctattacataatccatcactttggtaccaatgtatagcgaaatcactgttacgagtgcgctagaaattggaataaccgataatgaaatcgctacgacaatcaagtcaaagaatagcaatgcatacggtgtactgacatctaaatatttattggcaatgcgcgctaaaatcgttgttcccgctgttgtgccaccggcaagtacaataatcccgataccgagtccgacacatgtaccgccaaatactgcattcactaaaatattaccggtttcaatcttccagctttcggtaaactctaagaatatagagataagtatggttgcaactatcgttaagtacatacttctcttgcttaaaaatttatagcctatcgcaattagcaatgcgttaaagacaaagtttgtgatacctggagaaatgtgaaaggcatagtacagaacaatcgctataccagttacgcctccttcacctaaatcagcagatatgataaatgtatttacgccagctgaaaatataaatgatccaaaaacgactaatattaaatcacgtactgttttattcacccacacgacccccttcgatttgcttcaatcaattgaatgttagcaaataatcgtcaataccacaacatctatattgtcgcaaaagccgaattcatcggcctaaatcgctatgatactgccgatactttatatctcaactttttaaagtttaaaaattctgaaatttctgtttacttatacatctctgtttgctataataaaatctatcttcttattgatagccaataagaagccatctcctttgtgttgtttatagtaacaaacaaaacaatttttgctcgagtatatttttagtacctagtccttactaattatgtacaattaattcatttcccgtaaaaaccaagtaatgatgaatgtgtctcctcacttcaattacttggttttttattgtgttttttgatacctagccttatcaatacagtacttatgtgataggacttcttcaacaaaacgatgccacgcttttaaacaataaaaaaagagtgtacagaaacctaatttagaaaaaattaagttccctatacactccaacatgggttcgagataaaaaacatataagcattttaaatcctgtatataagtatacttcgcatgcttcacatcaatatgaatttattatgcattttaaaatgaaatctcattcaacttaccaagcaaataatccaacgaaacctgcagtcattaatgatactaaaataccagcaagtaataacattggcacatattgtgagacaaaatcggatgttttcttatccacgattcctttcaaagtacctacaatcataccgattgttgagaagttagcaaatgagattaaaaatgttgtgattactgcacgtctatgtggtgaataggaatcaacgacgtctttaatttgccccatcacaacgaactcatttgtaacaatttttttagccatttgttgtgctacaatccatgcttcgccccatggtaaacctaatagtagtgcgaatggatacatgaacgcaccgagtatttgatctagaccgaaactacctttaatacctgcccaacttcccacgatgccagttattaagttaattaatcgatcaattaagtctgataaagctacaaaactaataacaaacgccacaattattagaatcaatttaccagcattaagtacagagtcacctaagaatgagaaaaacggttggcgttccacttcatcattttgaatactgtaaataatatcttctttttcttcaagagtgactggatttaatattgatgaaacaataattgcattaataatatttaatggaatagcagttagtaccaaatcacctggaaccatagagacatatgcaccaacaatggcgccagatatcgaactcattgccatcattgcaacagttaacacacgtgtttctttcatacgcttcaattgttcatttgaaacagctaaagcttctgtattacctaagaacatcatttcgatactgaagaatgactcgaacttaggttgtcttgtaactttcgctaatacccaacctataccaccaatgacttttggtaatatattaaagtacattaaaatatcgaataatggtacaactaataaaattgggaataaagcacttactgccatgtccattgcacctggtttcacccaacttgcaaatgcaaagcctgtcccagcatgtgcagaatcaatcacccaagaaataccattcgctaacgattgtactgctgttttcccccaaggaaagtacattaaaaaccatgctaagaataaatttattaatactaaaatagcaatagatttccattgaatatgctttttgtttctagaaaataagactgcaatccctaaaaatacaaacaatcctattatgtttatcactaagaacatcactacacccaccatttctaatttaaatcattgttatcaatgtatgtttgaaagtacacctgttgctatgtattttgaaaatataaataaacaaattgtctccatccttaataacgcatgcattaattattaagtttcaactttccatttatccttttttcttctaatttttagtttgttcaatcatcataataaatgagttatactttcataagacattactttgaatctacttaataattatagcacgcatgtactttttataaaataactattttatagttcgttttatttcgaaaaatcagtcattgacttcctaaaatattcgtatttaattatgaaaacggcttcatttgataaacaaatgaagccgtttctgttctttttattttgttaagttctgtgtgtttacaaattgttgatatttttcatgattagtaattagttcttgatgtgtacctctacctgttactttcccagcatcaataaagataatttgctccgcttttttaatagtagaaagtctatgtgcgataacaaccgtcgtacgattttccattaattcctctaatgcgtcttgtattttccgttcgctctcactatctaaattagcagtagcttcatcaagtaataagatatctggatttttaacaaaacttcgggcaatatcgatacgttgacgttggccacctgatagtttcaatccacgttcaccgacgaccgtatcgtaaccatcttcaaacttttcaataaattcatgacaatttgctaacttcgcgtaatgaatcaattcttcatcagtgacttcccgattaataccatataaaatattatccttaatagtaccgttcatcattgaattggattgcatgacatagcctattttttcacgccattgacctaatgcaatatcgtaaattgaattaccaccatatgtaatatcgccatcttcaatatcgtacatacgctctataatattaaagattgtactcttacctgatcctgagggacctacaaatgctgtgactatacttggaggtatttcaaaattaacatccgaaagtatgggtttcgtaccatacttaaaatcaacgttttcaaatattaagctgccatcattaatttctgatgcttgagtaacatttaaaagttccgttggttcttccataatttcatagatacgactactggcaccaactgcctttttatagtctgtaactaaagttgataaattaattaatggggatgacagttggattacataaaatatcatggcaattaacgtaccggctgttattgcccctgtcgaaattctgattgcaccaaaacctaatataatggcaatcgtgagtagcataatcacacctgatatcggttggatgatggcagtaattttagcctgtttcaatcctaaaaagtatatttcttttaaatttttatgtgcattatccaattctaaatcttcagtatgagaaacctttactaaacgcatttctgttaaaacacgtcctaacaaaccactgaaattcgcgatttctgactgagtttttttagaaatgttttgcattactttaccgagtggtatcataatcaatacaaaaataggtatcgtaataaatgttaataacgtcatctgccaatccatgacaaataacataatcatagatccaatgatcgttaacacagaaggtaagagattgggtaatttctgagaaataaattcattaattactttcgtatcatctgttaaacgactcattaattgcccactttcgttttgatcaaagaatggcattttcaaatgaatgatatggcgccataacacagaacgaatggcataaataattttttctccaattttgcttagtaaatataaaccaatcccactcaataatgcatttactataaaaatagaaatgaatccagcgacaaacatccaattcatattttcaaatgaaaatttgtccacaagcttacctgtgaaaaatggtacgagtagtcctgtaatactacctaatgaagaaatcaatacggcaataataatcagccctaccggccatgataattttttgaataagtagaataatggattctcttgcttcatgctttttacctcttcataaaatttttatttcttttatacgataattgagcagatatttaaaaatttcattaaatgaattacaattcaactgattctattttacacaactcttttccattccacaaataccctaaactaatagggttatattttattataagtttacaatatgctaaaatatttctattgcaccaaaactgaatatattaagagggaatgtcattatgagaaagtttatactaactattataactgtactcttcgttggtacaattataacaccttttgcacaagctgaaagcattacgccaactcaggctgctaatcaatatggctataatgtcacagattcatatcaaccagaaggcgccattaatgtttcgcaaacagggcaactattatatcaatacaatatcaataaaacatggtatcccgcttcgatgactaaattaatgaccatgtatttaacactcgaagcagtaaataaaggtgatttgtctttaaatgataaggttaaaatcacagatgaacactatagaatgtctacacttcctgaactaagtaatacaaaactttatccaggtgaaacatatacgatcaaagagttattacaaattacggtgtctaactctagtaatgctgctgcgcttattttagctaaagaagtttctgggaatctttcagactttacagacaagatgaattcaaaagcaaaatcattaggcatgaaagatacgcattttgtaaaccctactggtgctgaaaataaacaattaaaagatttcgcacctaaaaaatacaaaaacgaagacaataatacgtcaactgctaaagactttggcattttatcacaacatgctgtacaagatacaccaaaaattttagattttactaaacaacttgcgccaacccaacacggtgtaacttattatacatttaaccattcacttgaaggtgccgatatgagcctagaaggtactgacggattaaaaacaggttcaagtgatatcgccgattacaaccataccattacaaccaaacgtgatggtttccgaattaatcaagttatcatgggcgccggcgactataaaaaccttggcggcgaaaaacaacgtaatatgataggtaatggattgatgaacatgtcctttgatcaatataaatatacaaaaatattatcaaaaggcgaacaaaaaattaacggtaaaacgtattttgttgaaaaagatctttacgatgtattaccaaaagacttcgataaaaacgactacaaagtcgttattgaagatgacaaagcacatatcgactatgaccgtgaatttatttcagataaatatggtccaccatcagttaatgttaataaaccacttgtacatcaagcaacaacaattgtaaaatcatcttgggatgaacatccaatcttaacattattaggtaccattttaatcattgtagccatagccattgttatttatcttattatcgacttattcagaaaaaaatcacgtaataaaaaataatattacccgatgggagcgggactacgaaatctcaataaaaaatttgatttctgtaccacttccatttttttacacataaaaaggttgttgaagtcagttcacctcaacaacctttttatgtgttatttaattttttcaaaacaagttccatttatatagcacattttacttttcactatcaccatataattcttttttaattttagttgtagatataccctctgtacgattaagatatatcacttcacatttgtcttttaagaaatcaaattcgccttcccaatcatggcccattacaaaagtatccacttcatagcgatcaacgtcaatttctttttggccccaaccactttctgggataacaaggtcaacataacgtatggattctaacatcattttacgttgttcaaagttataataagattttttatttttaatgcgattaaactcatctgttgataaagcaactattaaatagtcacccatttctcttgctcttcttaacaattcaatatgaccataatgtaataaatcatatgtgccataggtaattactcgtttcataaactatactccttaacaaaaaatttacttaaattttacattttaaaaaattatagcatattccatacaagtttacgaatatcgactgtttttatcggtttaaaatttgtttcaatttcattcttcctctgaatcgagcgcgtttgggtaaaatttccgctttaaagcgataataattcggtctaccaataccaacctttaacaatgtatctctccattgttgatacagcgttttattccactttttactgccttgctcaatcacttttacaattctaaacatcgctgcaccatcgtaatctgttttctgcatttccatcatgtatgcaataactaaatctaataattgttgtgttattatgtcatgcttttcaatatatgattgcaataaataactgacaatcaactcatccatgcggtagctataataaattcttgattctctaagtaataacgtatccataacacgcgctcttactttaactgcatcttgcatatacgaagcaaattgatctgcacgttgatctgttacggacccttcttgctcgttataaccatacacaatatcaggtaatagttgaatatcatgtgcttttatatatgcattaacaataaacgtatgttcttcacagaacaccacatcttcatcgaagcgtaagtctgcaaatttggcgttaaacattttagcgcccggaccgatagattgcatcatatctggacattgtgcgagattgactttatcaattttttgaatagcttgatgcgaataaatcgtttgccaatcgccatctttttcacgaccaatttgaccaattacaatatccacattgtcatcttgctgataataatctgccataaaatcaattctgcttggcaaaaattcatcatctgcatctaaaaacataaatacatcacctgtcatattagcaagcccaacatttctactagctgccgcaccttgattctcttgattaataataatgacatgcttgtattcattttgaagtttttcgagttctattttactatcatctgttgagccatcatttatacatataatttcataattttgtttcgtatcaacagatgcaattgctctacgaattgtattcactgcattaaatacaggaatgataattgaaattttcatattttcaccattttctctatctcattaataactttagtcaaactgtctttggcattatactcgtgccaatcattaaataaaggggttaattgtacatcatgatcttttagcttttctattaattctgtttctgtataggctttatatgcttcaggaatagctttataaaatgtatttaatcctcgctcttcctcatactgtgcttcatcatagacataaaataatgatggcttatctaaaatactagcttcaatcgctaatgagctataatcacttatgatcacatccgctaaaatcatcattgattgtaaattaatcgctgtttggtcttctgttgcgatagaaggatgtaacttgctaagtagcgtatactctggtaatgctgcttcaaattggcttttatcaatttgacgattggcttgcttatgttcacgataagtggggacgtatattgctacctttccttctataccatattgttttttcaattcattctgcctttttactacatcgagtcttgtataaggaaccaaccttggtagtccagttcttaaaaattggtcgtctgtcgcttcaaaagatgctttgaaacactcaaccattggctcaccgcctaccaaatacttatctgtcgcattatagacttttctatactgactcaccattttagcattggataaatccacttgatgatccgttaatccaaattgtttcaatgcacctgctgcatgccatgtttgaataatggtttgattcggttttttctttaatcctccaagcattaaataatacgtatcaataacgatgacttttgcagaactaagtgctttgatatgtttaaatacacgcttattacccgctggtaaaaagtttattgtttcaaattgttgtaaatatttacgatttgcttcatttccaatcacagtgattgcgtacccttttgggtataatgcttcaacgattggacacacgtcttcagcaaatgtcatcatgataacaatatgcttactttgtactttcttctttttatatattaaattcaaaaagcgaattatacccatatataattttttaataagttgtctcactacgttcaccgccaattattttttcaatgcgcttgtttatattatatctatcataaatagaaaattatagaaaaatcctttttatccatttgaaatactcaattttattgaaccaatgcaaatccttagatccctcgcatttcatacttaatacaaatgttgaaacgcctttataataaccgccaacattttaataggattacatgcacttatattcgtgcatttatacggctcatttcacgcaaatcacagtagttctaaagcgtagtaagcaattatgttgagtgtaaaaaagtctgagacatatcattatgtcccagactttgatttcaatatattacgcgctaaattcattgattcagcattctctatactttaaatatctacttatttacatgaaatctgcaaaatgatctcgataacgcatatgaagtattgaaccgagtataaacagaagtataataataaacatgttatacaacgttaattcccaatgtgtaataaagtaccactctttgtgtaacacagcagaacgatatgcctctgctaaataataaatcggatttaatttcattacatcttttacaataccttctggcggtacaattaaaatagatgaagcaaagaataccattctcattaaagcttgaattgcctgttgcgtatctttaacgagtacacctaatgtagaggtgaacaaagcaatcgctgttgtaaggattagtgcaaatggtacgtataaaaacagttgtaatgtataaattgttggataatagccagctaacatacatatgaatataacaacaacgagtaatgctagatgaccgtagaatctactcattacaatataggaagggatgatggataacggaaaattcattttcgctacatgattatacttcgttgctattgactttgttccttctaaaataccttggttaacaaagaaccacatacttatacctacgagtaaccaataaataaatggcacgccgtctataggattattacttctaatccccagaccaaagacaaaccaataaaccataatttgcatcgctggattaattaattcccaagccatacctaaataattattcgtattcgtaattttcacttggaactgcgcaagcctttgtataagatagaaatttttaaaatgctctctaaatactatccacactgcattcatttaaataaaccacactttcaatcgatttgcttatcatcatttattcatgacgctatttattgtattcaattccaatatacgctttatgtcgttacataacaactttcattctattcgcatatgactcattttgaaaagtgttattaagttagcatgttatatattaaaataatgaaaaatagttattataaattcagataaaagcgtttcgtatctatattattttttaactttatcattaatagttgattttataatgtatattcagtaaaatttaacaactgtataagtaataattatgttaaattgtactcacttactttacaataggttaataaatttaacaactaatataatgtataatataatggtattaactgtaaacaaggaaggtaaaaatatgaacgtatcggttaacattgaacatgtaactaaagaatatcgtatttatcgtaataataaagaacgtttaaaggatgtcattgttccttttcataaaaataaaacgttctatgcattaaatgatttgtcattaacggcttatgaaggtgatgtcatcggtttagtaggtataaatggctcgggtaaatctactttgagtaatatgattggtggctctctgtctcctactgaaggcgatatcaaacgtgatggtgatgtaagtgtcattgcgattaatgcaggattaaatggtcaattaacaggtatcgaaaacattgaattcaaaatgctttgtatgggctttacgcgtaagcaaattaaaaagctcacacctgaaatcattgaatttagtgaactaggagaatttatatatcaacctgtaaaaaaatattcaagtggtatgcgtgctaagcttggtttctctatcaacatcacaactaaccctgacattctcgtcatcgacgaagcattatctgtaggtgaccaaacctttgcgcaaaaatgtttagataagatatttgaatataaagaacaaggtaaaacgatattctttgttagtcataatatgaaacaagtacgtgaattctgtactaaaattgcttggattgaagcaggcaaacttaaacaattcggtgaattagatgacgttctccctgaatatgaaaaattcttaaacgactttaaaaagcgttctaaaggagaacaaaagaaattcagaaatgacttagatagttcaagatttgttgtaaaataaatgacttaaatttaaataggagtccgagacatcaataaacttatgtctcggactcctaatttatatgtacttaagtaaaattcagctcaagtaacactttttgcttatgacactaacttaaaactacaacctgttttatgaataacagattacaatcactgtgctttctaatgttatttctttaatctcaatttaaatactttatacaaaaatttgggaattgctttgattctaccgatacgtttccaatcaataagtaagcgatatacccattctaaattcatttttctaaataatacaggcgctctttttttcgttccactaaacacttcaattgagccacctacacccatgagtaccgttttattaaaacggtgtgcatgtcgctctatccattgctcttgtctcggataacccataccaacaaagatataatccggattaaatgatgtgacttgttt

SEQ ID NO: 43 - DNA, 37627 bp, Staphylococcus saprophyticus
ctgcagcggcgcaattcctagtgattgaaccttcagtatcatatttcgttcccgccggtaattcaatcactgcatttgcaagttcaccaatctttgacgttggatttgttgacaataatacaacttctgcacctacagctttagctttatctgctaataatcttaaatgctctgtcgaacctgagccagaaaggataacaaacaaatctttttcggtaatggaaggtgtagtggactcaccaactacatgcgcacccttcccaagctgattcaatctcatcgcaaaactatttgctacaaaacccgaacgtccttttccagatacaaaaacttgctctgctttaataatttgctttaaaaacgtttcggcttcactgtctttcacatgtgataatgtgttgtctatttcatctagtattaaacgataatttgtgatttctgtcatcattattttccttcaatcgcagctctacattgtttagcagcttctacaggatcatcagcatttgcaatgccgccaccaacaataattaaatcaggattttctgcaacaatatctttaattgtatctggtttaataccacctgcaactgctactttagaattactaattacagatttaactttacgtaaactttctaaaggagattgaccttcagcttgtaagtcataaccagtatgaacagcgatataatctgcgcctaaatcatctaaatctttcgcacgtttttctaaatcttgtactgcaatcatatctactaataattgtttgccgtgtttatgtgcttcatcaactgcagctttaattgatgcatcttctgcaacgcctaaaattgttactatgtctgcaccaaatttaactgcttggcttacttcgtaatcggcagcatccataatttttaaatctgctaatacttttacaccatcaatattatcatttaaatgttgtacagctggtaatccttcatttataacaattggtgttccaatttctacgatatctatataatctttaactttatttgctaattctgcagcatcctctttatttaataaatcaattgctaattgtaattccatatgttgttacctcctatatattatgtattcattatgctataataacttcggaaatacaatactgacaaatatgtcactgaggagaagaaattgttaatagaatataataataaattattttacacttctaaagatttagctttatcagtaattggtggtagatggaaaatccctattatttatcatttattacaatcagaagtacttaggttgagtgaattagaaaaaaaattaccagatattaatcaaagaatgttaattagacaattaagggagcttgaaaaggatatgataataaaaagaactatatatccagtagtccctccaaaagttgaatatcgattaactagtgttggtttgtctctcgacaatgtggtctatggtatttgtgaatggggagatgaatatttgaaattaattaataatgaaaattagttaatttttttaaagaagaaaaattgaaccaaactttatataatctctttgaggaatattgatatgtttttatattgactagtaaattgatataaatagagaatgactcagagacatataagtacgctctaaacatacaaaatattttttctgatattaatagtgtatatagggtcattagattatatatttaaaaaagcgaagtataattatacttcgctttaagttaatctttataataaaattaatattaaaaataatggaatattagtataaatactaaccttgctatcgaaactattgttgatatcacagtatgagtaacaaaagtctcttttagcatcattcttatatacaatactttgtatatacttatctttagagtcattaatgaaaaagaaaatcttaatagtaattacttgtatttttttcaaaccatgctttttcaagcagtttaactgctgcttttatttgttctatggatagtactgcaaagccaaggaggacggtttggccatcattttccccgtattcagaaacagaatttacttttacaccaaattttgctgcttgatcaatagcctcttgttctgtcataccattatttaaacgtagggttaaatgcaaaccagagtcttcgcctataacttcaacactttctgggaaatgttttgaaatagctgtaattaaaacatctcttttttttcgataaaccactttcattttttgaatatgtttttcccaatgtcctctatttaaaaattcttttaagatattttggtctatgcgagagactgtttgagcataaaagaaaaagtcttcttggtagatattgattagagaaattggtaaaaccatataactaatacgcagagaaggtaatagtaatttggagaaagtacccatataaattacattttctccggtatctaacccttgaagcgcaggtactggtttaccactatatcgaaattcactatcataatcatcttcaataatataacggtctttttgttcttttgcccatttcaatatttgtaagcgttttgaaaccggcataatcataccactaggaaactgatgggacggcgtcacaatcgctacatttgcatcagatttaattaaatgagaaacaagcataccttctgaatcgattggaatgaattctacttgatttgcttctttttcaaataacatcattttcctatgatatccagggtcttcaacagcaaatttgctctttggtaataatagaaaaagtatcttcattaaagtttgtgtgccagatccgataacaatttgacttggataacattttactcctcttgcttcgtaaatataatccgcaatcgctcttcgtaaatatagctctccttgaggatggcctaactgtaatatttgtttgttatcactttgaaatatttcatttaccaactttctataaaggttaaaaggaaaagattctggatcaacaccagtgtatgcaaaatcataggtataaacatcgttgttatttaatttttcctccacatactgggggttttgataatttatattaaaatcctcttcttcaatatcgcaaatataatatccttttctaggaagcgcttttaagtagccttcagcaactaattgcccataggcagattcaacagtattttgactaacacaaagatgctgagaaagttttcgttttgaaggcaacttcatttcaggtaataacctttttttctttatctcttgtttaatatacgaatataactggatataaatcggatctttgctttgaatatcaaaattcggtgttaactgtaacattaactctggccccctctactaataaaatactggcacttataaaagagtcagatattcactataataccgtaagagtacaatttttacatcatagcaataaaaaatactaacaatggagggttaaaatgaatcagcaaaatcaacatataggatatattatgattattagtggagcaactctttggggcctatcgggtccgatgatacagtggcttttccaacattccagcatttcatccatagattttcttgtttttcgcttactattagctggaagttttcttctcttgtatctttctttttcaaaaaaacaaatatttgaaatttggaagtacccaggtcacagatttcaactcatattatttggcgttattggtatgctcggtgctcaatacttttttatcgagacaatcaatgtaagcaatgctgtcacggctatgttgtttcagttttttgctccaatccttattacaatttatgtatccatacaaatcaagcagctaccaactgccagacaatttatctctatagttatagctttaattggtctctattttttaatcacaaatggttcgtatcaaaacattcttctaaccaaacagggtattatttttggatttcttacaatgctaggttttacattttacactatacaaccggtttctttaatcaaaaaatggggcgtcattcttgtagttgggtgggggatgttaatcgcaggtgtattttcctttttattaaatttaaatttaagtattcaaagttttattgaagacttaacaatcacaacaactgttatgttattaggtgtgattataagtggaactctttcatttcttctttatatcggaagtttaaagtatttatccccatctgaaacaagcattttatccagtatagaacctcttgttgccatcatcatttcaattacttggttaaatgaatcctttggatactatcaactagtaggcggactatttattattatagctgtcgtagctttaactacaccgaaaaaaagtaagtatgaaaattaaacaaatttttcaaaatttttaagctataaagtagtataaaaaaaatatttctttataaagagtgtcttaatcatttcaaaacatgctcgttaacgaatatatcttgatctatacattttttatctctcttttcttatgaggtactttatattttcgagaatcttccatagtttgtaagtaacttaatttcccaaaaagtagcaataacataatgtgcatttaaattatcagcttttaaaagcaataaacattaaaatccttcgcttttcagatttttatttcggtttaagaaaacacacaaattcttctttaaaatcagcaattacttataaacgagtcaaaactgtatagttacttttaggtaaatctttaattttattctagtatattgcttacatgtattaaacttatctataattactttttaattaattttggctaaataaataggatgtttggcattttgctacatatgaactaataattttctaaaaagagtaataaatcaatttattactctgagtttacattataatatcaagggtaaaatctttagaggagcgtggtacaaatgaaagcagttacttatcaaggtcataaaaacatggaagtgcgtgaagtacatgatccaataatagaagaatcaacggatgcaattataaaaataacagcttcaggtatatgtggttctgatttacatctttaccatcaaggtgatttatttatggatcctgattttgttattggacatgagccaatgggaattgtagaagaagtaggaaaagaggttaaaaccttaaaaaagggagatagagtagttataccttttaacataggttgtggcgattgtttctattgtaataatgaaatggagtctcagtgtgataattctaatccatcaccggcaagttggaaaatgaataatggtggactcttcggttttggtggcatgcacggaaaccactggggaggtcaagcagagtatttgagagtcccatttgccgatttctcctctttcaaagttccagatagtgatttgaaagacgaacaagtattatttttatctgatgtggtcccaacagcttattggagtgttgaacatgcaggcgtaaaatctggagataccgttattgttctcggttgtggcccaatcggtttaatggcacaaaaatttgctaaattaaaaggcgctgaacgtgttattgccattgacaatgtagaacatagattaaaccatgccaaaaaatccaatggcgctgaagtatataatttttctaaagaagataatataggaaaattacttcatgaaagcacacgcggtggtgcagatgtcgttatagattgtgttggaatggatggccaagttgctcaagatgatttagagataagttcaaattcagcgcaacgaggtaatattagtcccattattacagcagctgaatcagtaagaaaatttggaacgattcaattaactggtatttacggtacacctgcagacaattttccaatagatttaattttcaatagagatgtccaagtaaaaagtggacaagcgccagttattcatcaaatgccaaaattatatgaaatgattaaaaatgaggtttttgatccaacagaaattataactcatacaatgcctttagaagatgcaaaacaagcgtatgatattttcgatcagaaaaaagataataatattaaagtaattctaaaaccataataataaatatataaagaagtctatatacagattataaccagtatatagacttctttattaatttcatgtgataattttcagaatcgctaagttacaaaatttctcaatctaaccaatgctatatgaaaatatgaaacaattttaatcatttgctatataaagtttcaaatgcttagatgttaatgttttattctctttaacaaagtttataggatagccactaaattgtactttacccccatctagaccagggcctggtcctacatctataatccaatcagcatcacacataattgataaattatgttcaattaaaataacagtgttattttgttcaataaggtcattaaaacagtttatcaatataggaatatcagcttcatgtaaacctgtcgtaggttcatcaaatataaaaatactatctgtaacatcatcatttaaatattggcctaatttaacgcgttgaatttcaccacctgataatgtagatagaggttggccaagggttacgtaatttaatccagttttacttatagcttgtaacttagactgaatttcattttctttatcaaaaaatcttataccttcgtcaacagtcaattcaaggaaatcagcaatagaatagccatctatagttgcattcaacacttctggcttataacgtttaccgtgacacacttcacatgtttgtgaaaattcacccataaatgcaagttctgtttcaatataacctttaccaccacaattggcacaagctcctttcgaattataactaaacatagatttatttaatccagtttctttgctgaaaaaatttctgactctatcaaaaacacctaaataagttagtaaattagaccgattggaaccttgtatcgctttttgatccataaatactgcattatcattttttgcaaaacctgccttaacaagtgaacttttcccagaacctgctactccagttaatactgtcaaaacatgcttgggtatatcaactgtcacattattcaaattgttttgggtcactggtccaagatgataaaaactctttgcttcacgtatctcattttttaagtgatgtttgatacgtagtgcttccccagtagatgtatctgaagacaataattctttgtatgttcccttaaacgttatctctccaccttgcgcccctgaacttggccccatatcaataatataatctgcttctttaattacatcaggatcatgttctacaattaatactgtattacctttatgttttaaagatttcaaaatttcatttatttttgcaatatcctctggatgtaaaccaacacttggttcatcaatgatataaaccaaatcagatagcgaactatttaaatgtcgtattaatttaagccgttgtgcttctccacctgataaagaagtggttacacggtcaagagttaaataacttaatcctatataatcaagtgcttctaattgttttcggagtggttcaataataaactgggctgttgaattatttaatttattaagaaatgctaaattttcttttacagtcatttgtgtgaaatctgaaatatttttccccataattttacaactcaaaattttcgaatttaaacgttgaccgttacaagttggacaaattttattttccacaacatttttaagatgtttagcataacgttttttgttaaattctttatctcccaagaatattcttctaaacctaggtataagtcccacatattttgctgatttccgccattcttcaggtggtttttttaattttattggctcctgatacaaaaacaaatctaattcttcttttgtatatgcttttaattttttatcattatcaaacagaccactatcacgataagctttccctctttctttatcaggtccaaaagatggaaaattaatagcaccttcatttaaagatttgttccaatctaagagctcatttaaattaatgtcttcaatgtaacctaatccttcacatgtttcacacataccattgggactgttaaatgaaaaggcatctgaataaccgacaaaaggttcacctatccttgaccataacaatctaacagaggcgtatatatcagatactgtacctacagtagatcgagaattaccattaaatcttttttgactaatcgtcattgctacaggaagatttttaattgcttttacttttggtttaggctgcttatttaaatgaaattgaatgtagctagaataactttcatttaaaagttgttcagattcagcagctattgttctgaaaaccagtgatgatttacctgaaccagaacgacctgtaaatactgtaactaaatgtttaggtatagttatatttatatttttcaaattattttgtgaagctcctataatggtaatatcattcataaattaaattgccctccattgtaatttttaacaattaatagtatagatgaagttaaaagattagtagaatttcgaaataagttacattacaaaaacagtatgtagaatatctaatattttatcgtagattataagttatcttaatgaagttaagttcattttatttttataaaacccctaacaacaagagactaacagcaaagttataaactttgctgttagtctcttagataataaatactgattgatattacaaaattatgcttttaattttttaataatttctctattgaaatcatctaagtcatctgggacacgactcgttacaatattgttatctattacaactgattcatcaacaacgtgtgcaccagcattagataaatctttacgtacattgataacgccagttattgtgcggccctttaaatcatcagtatcaactagtaaaagtggaccatgacaaatcgcaaatgtaggcacatcattttgagtaaaatacttagtaaatgtaccatagcgaccttcttcatcaccacgtaaatgatcgggtgagaatccgccaggaattaataatgcatcataattttctggtttcgcatctgcaatgctaacatctacagttactttctccccatgtttgccaacaagttcatgtttttctgtatctccaataacttcagtctcaaatccagcattttctaatgcttcttttggactagtcaattctatatcttcaaattcatctgctaaaatgattgctacttttttagtcataatacaacctacctttcaattatattttaaaacctaagtactatatacactagaaaaaggaagtttaaacataaaatgttttctaattttttcacaaactacatgtgcatttttatctgtttagtttaatcttatttaatattaattgtaactgattatgcctttgtatgggcatctacaatatcacgacattgtttagcagcttctacagggtcatcagcatttgcaatgccgccaccaacaataattaaatcaggattttctgcaacaatatctttaattgtatctggtttaataccacctgcaactgctactttagaattactaattacagatttaactttacgtaaactttctaaaggagattgaccttcagcttgtaagtcataaccagtatgaacagcgatataatctgcgcctaaatcatctaaatctttcgcacgtttttctaaatcttgtactgcaatcatatctactaataattgtttgccatgtttatgtgcttcatcaactgctgctttaattgatgcatcttctgcaacgcctaaaattgttactatgtctgcaccaaatttaactgcttggcttacttcgtaatcggcagcatccataatttttaaatctgctaatacttttacaccatcaacattatcatttaaatgttgtacagctggtaatccttcatttataacaattggtgttccaatttctacgatatctacatgatctttaactttatttgctaattctgcagcatcctctttatttaataaatcaatcgctaattgtaattccattaaaacgccctcctatctatcttttacattataattatggtattatttacgacaaataacaatactgacatttttgtcactataaaaattaaagatgttgtgttgttaatttaatataataataaagaattttatatacccaaatatttagcttttctataattggtagaagattggaatgtctattctgctggtattgaaacacatggtgttaatcctaaagcaatagaagctatgaaagaagtagatattgatatatcaaaccatacgtcagacttgattgataatcatattttaaaacaatcagatttggtcgtaacgttatgtagtgatgcagacgataattgtcctattttaccaccaaacgttaaaaaagagcattggggttttgaggatctagcaggtaaagaatggtcagaatttcaacgtgttagagacgagattaaattagctatagaaaattttaaattgagataataataaacacctcttattaactaaataaggggtgttttgccatttaaagaacaaaatttgtgccatataactccaaaactgacataaaattaagaggtttttcttgaaaatttaagtctataaacttgtactataatcaatgtatcgaaaatatcaaaaatcgtgagttttcagacgatgagagacgtgcttatttgcatcgtgtcattttaattgctctatggtaattatattacctgataaattagacatttttaatattaaaaaatccttcctttgtataaaggaaggatcacataaaataattattaatatagaagacagggcctatttattaaaatctataacaattttaccaaacgcgcctttcatttgatgttcatatgcttcttttgcttggtcaaatgaataaaccgtatcaattacaggatctatatttatttgatctaaagctttattgaaatcttcaaatgctctatggtgtcctagattgataccttggattcttgcttgtttagcaagtaatgcgaataaattaacatttgcttccatattttcaagaaatccaacaacatatatatgcccttgaaaagctaaagcatctatagatttagcaatacttgacccaccaaccacttctacaatatgttctacacctttaccatttgttaatttttgcacttctttttcccaatcagggtgtgttttgtagttgattactttagaagcgccaagttctttggctttttctaatttttcgtcactgctacttgttgcaataacttctgctcctaatgctgatgctatttgaattgcaaatatagaaacgccacctgtgccttgaacaagaactttatcacctgctttaatatttccatactcaactaatgagaaccaattcacaaatgctgctactggcaaagttgacgattgattatctgtaagtgtttcaggagagaatacagctgcattttcattcaataccatgtattctgaaagtccaccatctactgtagcacctaaggcatgtgattgttcatcgcttttaggttttccatctagccacttggtaaacatatgtgaagtaacacgatcaccttttttaaatttggtaacttttgagccgatttctacaactattcctgaagcatctgaaacaggaataaacggaaattttaataattcaggcgtatatataccttcgacaattgcagtatctcgataattaagtgagacagagttaactttaattaaaatttgatcttctacaatttcgggtttctctagttcaacttgtttaaggttatctaaaccaaaattttctaattgccatgctttcactattaaaactcctttttattagtattatggaaaaatttacaaaacactcaaatcgtcatatcgttaaacgacgatatataagtatgaaaaaagaactaaattatagttcttttttcaattactttacgtatatttttaatgacttgttcattcctcttttaaataataccctgaaaccataagttttacgcactatttttaaaatcgaaatcaatttgcacaattgatgaaaaattttaaaagttagtaatcaattaaacaaacgtatgtggttcattataagtttgttcaattgattaatcgtttgcgattgattattctttaatgagaataggagtgactaaattgattgatgatgaaatgaaattggcacaccagctatgcttttctgcttataatgttaacaaattattcagcaaattttatgaaaagcaattaagtcaattcggtttaactttttctcaatatctagtgctattaacattatgggaagagaaccctcaaactttattatccattggtaaaaagttgaatctagcaagtaataccctaagcccattactaaaaagacttgagaaagctggctgggttcaaagaaatagagatgaaagcgataaacgtaaccttatcataactttaacgataaaaggtctaaatgagcaagaagcagtacatgaagctattgctaaatgcatttcgtcacaatttgatgtagatgaatatatgaaagccaaaagtattatggataatttagaagaaacgttgaaaactattacaaaggatgattcaaatgaaacaatatgatgttgtatttttaggtagtggacacgcagcttggcatagtgcgctgactttaaacaaagcggggaaatcggttgctattgtcgaaaaagatcgtatagcaggtacttgtacaaactatggatgcaatgccaaaattttattggaaaacccttatgaagtactagagcaagcttcacactatcccaacataattaatactgaagcattatcagtgaattgggaaaaccttatgtcttataaacataaaatcattgaccctatggcaaatactttgaaaggtttatttgaacaacaaggtattgatattattgaaggggcaggaaaattattagatgagcatcacctcgtagtagatggcgaacaatattacggtgaaaacatagttattgcaacaggtcaacacagcaataagttagatattgaagggtctgaatatacacacgatagtagagacttcttatccttagagcaaatgccaaatagtatcacatttataggtgtaggtattattagtattgaatttgctagcataacaattaaatctggtgtagaaactcatatgattcatgttgacgatgaaccgctcaaaggtttttattcagcacatattgctaaattaatggataaattggcaacagaaggagttcaattccatatgaatgaaaatactactgtaattaaagagcaaggtgacaattatactgtatcaacagaatcaggattagagattactactaactatgtgttagatgctactggacgtagaccaaatgtcaacggtattggacttgaagaagctggcgttaatttcactactcgaggtatacaggtagatgaatatttacgtacaaatatccctaatatttatgctagtggtgatgtgttagataaagtaattcccaaattaacacctactgcaacatttgaatctaactatattgctgcgcatattttgggtatggataaaaatcctattacctatcctgcaataccttcagttttatatacactaccaagattgtctaatattggagtttctgtagatgaagctaatactagtgaggactataaagtgatagatattccttttggtaaacaaatggtgtttgaatacaaaaatgaaactgaagctgaaatgacaattgtattaaataatgataaacaattagtgggagctgctatatatgctgatgatgcaccagatttagttaatttattaactttcattgtaaaccaaaaattaacggctcaagatttaaataaaatgatctttgcttttcctggatcatcaagtggcgttatagatcaattaaaattagcaatgttataaaaggagtgctataaaataactagtaatatttatgatatacaagttgttaacaaagatggtagtaggtattaagtattatattagttaatactgccacaaaatgtggcttaagtggtcaatttgaagaattagaagaatattaccaaaaatataaagagcaagggctaattatacttggatttccttgtaatcaatttgctaaacaaaaaccaggtactgatgaccaaatagctaaaatatggaaagaaaatcaaatggaatttcacaaaatttattattgctaaagatggtaatgtagtaaaaaaacttgctcccaaaaacagtcctaaaaaagtagaaactttatttcagaatttattataactaagcattattaattgaaatgacacaataatatagcgtttaatatctaattatgttactagtaaacatatccacaatcctactgaatagaacgaaaaaagcacaatacaaagctaaagttgataaaaatgtactgaagctattacaatcaataaaataatagaaatttcattatctgattctattgttgatttactccattaatttgttttaaaagattttcatcctgtgatgtaaattaactttattgatcataatcactcctatttttaaatatattgcatccacataacctaaacagataaaactactttgcattcctaccaattatagtgttataatgcaatcaacaaagattatcaggcatgtatgcaccaaatccccttactatggccgtagtaaggggattttttggtgtgactagtcgcctattcgtcattacgcttgcgtagccaatgcgcaaatagcgcaacgagacaaccacttgctgctgtggtcatgatgttcacaaagatttcagacatcgcgtatgcacctcctctctacgtcaaattgacgcctgagagataggcgactccatgattataacatctgtgaatgtacaagcatatgttcttccgataagttgaattatgtcagctcaaagataaaataaatatacttattttagtaaaaataagttttcactttcttctcacatactactctattatcactacatccctttttaattctttttcatagactttcttaatttaaaatactacaagtagaaaatagaagtgtatattaaatatctttaaaattagaaaggatatgaaattatatattattaataaatctatcatgtttttacatgctcttaggataaattgtagcgttaatagaacaaaactagtctgataaaagtaatctcttgaatatttataatcaatgtgagtatattattaaaaaacttgcaaatatttgaatggaatggattgaaaatgccgaaagaaaaattaactagagaagaacttggaagcaaatgatggaaactactataataaaatcaaatataaaaaaagtaaaaagcccttcgagtgatcaatatgaaagtcttagatcaagaacatctattaaaatacatagagatttcaaaccattatttgatgaattagtagcagaagaacgtgaaaataaaatagattttgtagatgcattattagtattttatgctcaagaaaagcatccagagattttagaagcctttaaaaaccaggaattaaaaacgcaaaaaaatgaaaaagcaaaatatctataaataatgtagtatttattctcactattcatttgtctaccaatgttcctttataagcagtaaataatgcataaagaaagatacgtttaaatgaaaatgaggcaatacacatctaaaatacaaagcgattaacagaaataattaatctgttaatcgctttgtttacttactcaaagaaatcataaattaatgatttctgaaaaaggaacccttactctttcttcaatttatataaattagaacacgtttgcacataatcaaatatcaaaaatgattttaaaaataagagattaaaaaatcattagtgaataaacttctaattctttataccaaaatagctccttataaatttaaaaaacataaaatttaacatataaaaatttgcgatttgctttattgctttttaactttttaaaattttaagtatcaattaataacacaaattcattttctataactacttaaatttcgtttttggtgtttcattttgtcaaaaatggcttattctatcagaataaaagttcaaaattctttattctactagaataaaagggtctctgaagccctttaaataggctttatctataggattagggttcacattaacaatgccattcgtaatttatagaataaaaattacttaatgcatttttgtctaatataaatacgctataaatactgttataatagtatttatatagagagcaaatgacgaaggaatggtaagaaaaatacatcagctatgctgattgacacgtcagtggcattgtatttccttatgctcttattttttattctgctttcagcaaaaaaaataaataatttgtacaaaagttaaatgaataaaaatgattttttcgctatcataatgactcattcttttcgtaccaaatcactcaagtttatctttttctattattatttgtttaatgatgtccattaaacatgtctgttatttcattttatttaaagacgatacgatgatttaatcatttgaaaatgaacttttaaaatatagaaaagcaatttattataacgattctgatcctacacgttttccaaaatcaatttcttcttcgttatatttacccccatttaaataaaactcttgtatttcttctttaattgatttttcattttccaatatcttatatctccaaaatttcaaaatattgtatgacttatatacttcgtttcaatatttatatattccttttaatttaagtatatgatatgcatcactttttccaatcactctatttactatatactaaaaataactataacagtttataaattaaagttgggttatttctatatagtaacaagacaagaagaaactcgttttcaactcgtttcttaaaaatataaaaaagagatgtgaaaatattttcacatctcttttttatattaattgatatctataacttttctttgactattttctgtttttggtaaatctacagataaaataccatcttcaaatttagcctcaatattatcttcatctatattattaagtgaatacattctcttcacgttactataagatctttctttttgaattactttcccttcatcatctttttcttcatttacctgattattttcagcagaaattattagcatcccattttcataagaaatatctatttggtcttttgaaaatcctggaagctctgcttttaattcatatctatcgtctttttcactaatatcagtttttatactttgttcatcagggaagttactaaaaaattgtcttctaaaatctctaaataattcactaggtgtcatatcaaaataatctcttccaaatggttttaaatcataagtcataacgatcactccttattatatttaacctattttttgattaatatttttgacataatccaaatcatttaaatacgcttcccaattactgttgaattcgaattcaacaaaagggctaaattcaaatacaccatcaaaattagacatattcttaaaaggaattagtttttttgaatttttatctaaactcatatcaacccctccctataaagcatataactattttcactatatatataacataaaggtcaaagttggtcaataaattttctcggcataaatacgtggtctatttatttttcttttctccaaaatagtaagataaaaacactccaataccaccaataaaaactgcaacaaaaatcccaatccacattaaaatagacatagaaaacgctcctttttaagtaaactctatcacaagaacgatttaaaatttaaatacctttattttgaattttaagggggtattttaaagatttaggggtaaatcatatagttttatacctaaaaacgaatataagatcttaaaatgcaaatatgagccaaataaatatattttaattacatcaactaaaatttgagcaaaaccagtgttgatttttttcgtcgtcatcagttaaaaaatccaatgacttaaccgaatatttcgaggtctctttgattgctataagattatctaaattattggttaaagatattatgttgtttcatgttttgacgacgcatattaagtgcgtgtatttcttcaagttcagctttaatcgattgcattaaatatccttgcatagcttcaacggtttcattcttttgtagcagcatcgctttaaaacgtttcaacacacttacaatttcaaactcaacatcttctaaacgataataggtatcatgtgcattattaaatgatttcttccctttgagtaatacacttttaataattcgtatttctctaatttcaaatttacttaaatagccttgaagttgttgcggcaattcttcaaggagttggaacttaagcgcctcattattaaattcaggttgttgatgatttgtatgatccgaatgatcatgacttattgaattattatatgtatcattcatatcatacgtatcattattctcagtttctatataatcagtattacttaaatcagtatcattagactgtgaatttggaagttcttgaacacttaaattcatagttctagaacttccaaattcattgttctggaactgtgaatttggaagttccttggtacgactgccttcaacatcataattgggttttaataaatacaatctattgggtttattaaggccaacacgttcttgagttagtaaattaaaacttactaactcttttttcaattttatgattttttgttctgcataacctaagtattcgcacaaatgtttattactgaaaataaagtaaatgttattatttttatctacccattcattttggatggataattcaaaacgatcttttaataacgcatacataattttggcttctgctgacattttcttaaaatatatatcttcaaataaatatttaggcagttgataaaacctttcagtttttacttgtgatagattgtatttctcaaaattgggcataataaaaacctcatttccactttttttggattgaggtaataaaacaatttttacgtaagttatatgttttgtgcttgcacttagatgattagatatatataatacaagtatcaaaaaaatatataaacaaacgaatgcgaatcgttttattaccgagagtcgatgctacgccaatagcatcgactcttttaatattcataaagtaatattaacacttttatggtcgtatataaagcgttttaagtgtagttaaaagcacattataacctcaaaatagtagaatttattaatttggtgcctaattaggcgccaaaaatatctaataggtgactaattaggcacttaggcagtgaaataggcggtaaatttaggcggtaaaagatgaaaaaaagtttgttaggtggtaaaatttaggtactaaattaggtacctaaagggtggttgttgtgaaaactattaaaatggttgctgatgaattgaatgtaactaagcaaactattgttaataatgccaaaagtttaaatatatcttttgaaaaagaaaatggaattaattatatcaatgataatgattgcttaaaaattatagaaaaaattactaagaaagaaagtacaacgcaaaataaagaagcaattaaaaaagaaattttcgatgaaaatactacagaagataaaaagtatttagataataattcaaatagttctgagacgttaaaaacaaaagttaatgaattagaaaagcaaatagaaatttttgaaactagggctaaaaatgatgaaaaatatattgagaatttaactaaacaactagatcaacaaaatagcaatgttaatacattaaacaaattgttggaaaatcaacaaatattagctttagaaagtaataaaaagattcaaaaactagaaaatcaattagaagaagaaaggcaccttaaatatacttttgatacagcgactaatgctagacaaaatattaatgcgaaagaagcagtatttactgatgaaaatcaaagtatgaaccaacaacaagaaaagaaacaaccaacagaaacagaaattggacataaagatattaatgaagagaataagaatgaaagtataaaagaaaacgtagtaccaaaagatgaaaaaccatcagaaggaatacatagtgagcctgatgatagggaagaggaactacctaaaaaggggttttggagtcgtttgtttggtagttaatataattaattaggcactaaaagattataatcttttagtgccttttttatatagtgagaacttctgataatcatcggttatgttaatttaaataataaatcatatattatgatttattatttattacaattttccctctagaatgaccattttcacttaatttatgagcttctcgaacaaaagatagtgggaaaatagcttcaaagtaagctttgacaacaccatatccatataaattaacaacttctattaaatcttgacgatttaattctgtccatgtgaaatatgctgtaattcctttactttctgctttctttttattaacttgcccgcgtatagatattagtctgcctccaggtttcaatacatcataactacgttcaagtgtttctcctgcttgagtatcaaggacgatgtcataatcatgtacataatcttcaaaacgttctgtattgtagtcaatggtaacatctgccccaattgattttaaaaattcatggttgtgtgtacttgcagtagttgctacataggcacctttagctttagctaattgaatgccaaatatacctactgcacctgcgccaccatgtattaatactttatcgccgtgttgcatttcaccatattttattaacgcttgatagacagtcaaaccattaattggaattgtcgcaccttcttcaaaagataatgattcaggttttttaacaactgtgttttgattaatggccacaaattctgcataaccaccgtttttatcaagttgttgtgttgcaataactggtgtacctactgttaaatctgttacttttgagccgactttacgtataacgcctgatatatcccatcctaaaatgagcggtatagggtaatcaattttcccttcttgttcacctcgtctaacatgccaatcgtatgggctaatacctgtattttcaacttcaattaatacttcttcatctgttatctcaggtagtggtaaattaaattcttgtaatacatcagcttctccatatgattctattgcaaatgctctcatcaatatagcctcctaattagttcactttgtgtgttggaaaatatggaacaatttcttcgcctaattcatctataatgtcttcaacaggtcttctagcaattctagcaaaataagcaacaaaggctaaatgatttactccaatttctttatactgatacaacaattctcttaaacgatttctccctaatctaaatccaagtggtatggattcaggtaattgattagagtcttcgtttaaatcaatgtatttacttcttcatttatttgttttctttatccaatataaagaaagttttacttattttttaaagggaatattaacactaattatatatttcacaaaggggagttttttatgattaatagcatagatgaaataaaagttccagatagtaaaattgttcaagatgcccaaaaaatcgtacaagaatacggaaatgaattaatatggaatcactcaaacagagtttatttatttggcgaagtcaaaggcatgcaagataaattacaatacgataaagaattactttatatcacttctttattccatgatttaggtttaacccaaacatacagtagtgatgatttaagattcgaagtagatggcgctaatgcagttagacaatttttaaaaaattataattataacgaacgcgatttacaacttgcctgggattctattgcgttacatacaacactaggtgtagctgaacacaaagaaaacaatgtagccttattatatcatggtgtaggaacagacgtaatgggcgataattgggatcaatattctgatgaaatcagaaaagcaatcgttgctaaattcccaagaggcaattttaaacataatgtaattaaatctttttatgacggttttaagcataaacccgaaacgacttttggaaatataaaatcagatgtaattaaatatttcgaaccagaatacccacaaaataacttttgctcatgtattttacgttccaaatgggatagttaaaaataactaattgctttattgacgttgagccttggaacccttaactaaacttgtaaatctggtagacccaattgttattgcattataggtctaaaattcatcgttataatttagttaaatcctgtaaaggggcttacacgtttgttccaaacggcgcaaaaatcataatcgaccttcgtcgatttttttattttaaagttaaagaaacggctcgagatattccgagcagttataaaaattaatttgtcttgaatattgctattacatttttgaaaagtgatgtagatttataaccataatttttggatttacattgacgatactgtatcgaaagaaaaaggcaatctattttttctaggttgccttttatttttatacctaaaggcatacttacacacctaaaaaacgtcgtgctaaaaacaaatttactctagtagtacttttttaaaaatgtcttttcaaaattcatgagctgatacataaatttttcaaaatcttctctaacaaaacaacttaacaaaagtaactttatttcttttgttaagtttattttcatttcttttaataagcgttctccattatgcgtcaaactcactaatttagtacgtttatcattcgaataaactcgttgcacataacctttgctttctaacttcttaacacgttttgatgcagctgtcttataagtacgttgcttatttgctaagtcgttaatcgatactttttcattatgctgaataaaatacattgtttctatttgttcataagataagtaacgacctggttccaattctttaaccatgttagtaattgctttattaatattcgctgtagcatcatagaattggttaattattatttctaagtttccctctttatgctccatattaaccttccttactaaactatcgtttttcaaccatcattgattttttaaaaattaaatattacttattataagcataataactttattccattacatcactttcttcagctttttcagttgcttttctcatcagtggatcagtaattggtttaaagataacaccaattaataaaaatcctataccaaataatgaaagtatcactaattttttagttaaaatttcaggtacaggtcctccaactgcttctcttaaagcatctattgaataagagaaaggtaaataagggtgaatgacttggaagaactctggtgtaacttggatagggaaggttcctccaccacctgctatttgtagtacaaggaagatgattgcaattgctttccctggatttcctaacaatgacactaaagtatatacaattgaaataaatacaagtgatgagaatactgatatagcaataaaccatacaacagattcaacttgcgctttcagtatcaccatatctccaattgatacgatgagtgcttggataatacccaacgtgtaaaacaacccactctttcctagataaatttctcttgtcgttagatgtggctctaatgatttatgtttattatctgtcgttaataaacttactagtaataaagctcctacccatattgctaatgctgtgtaaaatggtgtgcttgctgaaccgtagtctttcacaggaaatatgtctttttgatctatattaattggatttgcgattacattagcttgttttttcaaatcatttttcaataagtctaccattttatccactgcatcgtcgtcttcaatctcgtcaaatagtttgttcgctttagccagatctttttcaacatctggtaattgattacgtgcaaaatctgccaaattgtgcaagctttcttttgcacgtggttgatttgtatctaaaatatctaccaaattatcatagcgattaaacagtgtaggtattgtattgttcacagttgctgttgtatcagataactgttgttctaaacctggcaagtcattttcaataaatgatgctgcgttagaaacactttgtttaaattgtggataataattttgagcaatagacattgcatccatatatctttgctcaatgactggtagtgcactttgaatcgtctcaactctatccttaccagtagttaaaatactttctcctgaatttataacttgatcaattgtgtttaatttcgattgaacagttgatagttttatatcgccgtcatctaataatgacatcacatcattagatacatctaataatttttggtttagttctgacttaatatagtttcttaaatcatctaagctactattcacgcgtggaatttctttaagtaattctactgcttcttctttaccagaacttccattcgaaagtgcttcactaagttgattttgtgtcttaattaaattattaattctattatttgctgactctaattccttaatctcatcagaaagatctaccttttctctatcttcaagctctgataatatatctataaacttttgattggacttacttgttacttcaagcctagatttaatattatctaaagtttctttgaaatcttttggcttatctgtagatataataccgtaagtgacattttttagcgcattaatatcttcttgactactttccgcttgtttgtcggtataattggataaagataataatgattttgatagtgaagattccattgcgcttacatcttcactacttattgctgttccattttgattatttccagcattgtcgctattactattacttatttgcgaagttttaatatttgaataactatctgaccctttagaactttgctgctcagtttcaacattttcttgtaatcgattattagcattttgatttgcttcttgtgcattatcaacgacttcttgatagccttcgacacgctgttgcactgcaggtaaatatccttgcgcttcattcaggccttgtaaccctgcgtcaacccctgcgcttgcaaggtctacaccacgattaatttttggaaaagcttctggtacatcattagatgcaacattcaaggcattctcaatatttggcatgtagtcatttaatgccaatatcaatttagctcgctcatttaatgtcggaatggccgcattaacttggtttaatttatctgcagcatctataacctcacctttatgatttcctaacgctctaaattcatcagcataattgtcaatttcatcctgattttcatctaaatatattattttatcagcaaaatcattaattttgggtatagaatcattagctttagatactgcatcttcaattttatttatggttggaatttcttcctcaagtttcacgccaagtcgatttgcttcatctaataatgcttttgttactgtctcattaaattgttcatttgctttttgaacaatggcactcgtccctgcatttgtcattttaggcgcaatcgcattaagtttttgattcactttgtattctacgtctgcttgctgtgggttttttcgaagtgtgccggtaatttggtgtgtaaacttctctggtatgtaaatggccgcgtaataatcgcccatcttcaaatcatgatcggctttttttcgacttacaaattgccaatcaaagttatcatctttctttagtttattggtaattttattgcccacgttcacatttttatctttaactgtatctcccttatcctcatttacaacagccactttaatatttttagtattaccgtatggatcccatgtcgcttctaagttaaaccaagcataaaaagaaggaagaagtgctaaacctcctaaaatcactaaaacagcaggcgtcttagcaatctttttcaaatccattacaaataattttattgcgttcttcatttatacacctctaaaactgtatctattgatttttcttacataaatttaaaattactatttgttaatttcatataagttgatatactgaatgcattaacaaagtctatccattttatagttgatatgtatcaactaaatctaagtctgtttacagtgtaccaagacaaaccatagtttgtacatagcaaaataatatattttagaaaagaggtattttcatgaagcaacaaaaattattagtctgtttgctttcaacgtctttacttattccatcattttctatcaacgatgttagtgccgaatctttagaaaaaagtgccacaacttctgaatcaaatgacgtgtataaggaaaaagatgaggagcaagctaagcaatcacattcatcaaaaaatggaaatgatgaaaagaataaagctagtgatgaaaaggaaaatagtgaacgcaagagtaagttaaatagtacaaaagatgaaaggactacagaagatattaataataaaagacataaaacttctgataataaatcatccaatgaaaaaataccaagttcatttgaaaattcatttaatgattcatcgtcttatgatagtttgaatgttttcaagccagaaccttttaggagtgacaaggatgggctatctgaattattaaatcaactgttctctaataataaaatgaaacaaacttctactatagagaataacgatgtacaaaacgagaagaatgacagtcacaatgataatacatctatagatcaaataaatccaaatacgacatattcggatgatagtgacgaatcaaatactaacaatttagaaaagaatagtgataagggttcactacaagatgacattgatgatgtacagtcatctgagaagtcagagaacgatgatatagataataagtctgaatcaaacaaacttccagttgataaaaatcaaaaaaaagatgatggtgagtcaaaacaatcctcccaacaagatcaatcttatgaagaagcaaataatgatgctgataatctagacaacaaagataatgacacacctactactgaaaacgataatgccaacagtgataacgaaaatgctgataaatcagatacaaaatctgacgataaagtattagatgcaattttagacgagtatagtgaagatgctaaaaataataaaaaacaatatgatgctcaaaaagatgatttatcaaatggaaatagtaaaagtaagaaaaataattctgaaaaacaggcatcgaatacaaatgctaaccctcaattaccgtctgaatcacaattagctaaaaaagaaaagccagctcaatcatttgaaaacgacataaaccaatcaaacatcagatctactgcaactttccaacaattgccaaatttatcggatgataataacaattctaacgatataacaattactgaaagtaaaaatacacgagattttattaaaacagttgcacaagacgctcacgacataggtcaagatgaagatatttatgcatctgttatgattgcccaagccatattagaatctgactcaggcactagcgatcttgctagttcaccccatttcaatttatttggaataaaaggagcttatgaaggtcagtcggctacatttaatacactcgaagataatggcaaccatacgttccaaatttcagcaaacttccgcagctatccaagcaaaaaagaatcattgaaagattatgccaatttaatcaaacacggcatcgatggtaaccaggacatttataaaccaacatggaaaagtgaagcttatagttaccgttcagcaacaatgcatttggctaccacatacgcgactgattcacaatacgcggacaaattaaatagtattatcaaccactatgacttaacacagtttgataataaaaaaatgcctgatttagataactacaaagcgaacaacgatgattatgattcagccttcaaaccattttcagaaacaacaaatgactctccttatcctcatgggcaatgtacatggtatgtttataatcgcatggcacagttcgacaaatatgtgagtggtgatttaggcgacgcacgaaactggaataatcgagcagaaagaaaagattatgctgtttcttcaacaccaaaagctcacactgccgttgtatttgaggcaggtcaacaaggggcagaccagatctacggtcatgtagcttttgtagaaaaagttaacgatgatggttctatcgttatatcagaatcaaacattaaaggacttggtatcgtttcttatagaacaattgatgcagatgctgcaactgaattgagttacattacaggtaataactagtaaatttaaatattccttttattttctttattaaagtgtttaatttagcttttattcattcaaaatacaaatgctccattcaaagttccacttactagtgttcactttgaatggagcattttcaatatactatataaattaactcgtactaaaatacgttataatttaatatttacaatttttcgatttatttcgtttgatgaaccatattaatccaccacctataatgaaaagtagaatccctaatggaattgttgatttttttactactgttcctgtatcaggtaaagaaaaatcaccattattgtcaaataaaccacttaaaaagctacccgaggaatcacctagagataaagcacgcccaggcgaaggattagatatatccttaattccatctaatatactatttctattgaataaatcgtcaaatagacttggtgtaccaagtaattttgaatttccacttaattttcgcatctgttcatctctgtctaacaaactcccatcaaatttattcgataaacttggcgtatattttaatggttcaaacaaaccatggatatcatctttaaatttacttatatctttatcagcctttaataaatcattcaactcattattaattcccgatttcattagatttaataagttatgcttagaatcttcttttttggcaataacgtcagcaagcgctttagctttagcatcatttaatttcgtagctagcattgtttctaaagctttacgtttatcatgagattggtccaatatattttctaaaatatcatcgcttgtaacattgtccccaaaatgatgtttgattaaagctacaatttgttcgttactcggatttttatgcattatttcaccagcgatttttgatgtatctatatgatcaaatttagttaatagtatcgttttaataagttcttgcttatcagatgttttatcaaacatagattttaaaatatcatcactcgtagtagtagataagttatctaactcactaacaacttgactcgcgatttgttgatctgttttaccttttgtatctatacgttctaaaatagattgtgcactctttttatcaaaagtaccactaacaatatcttttacagcttgttctttattatttacagattgtaaatgatttaatacaacgtcattttgtttctttagactttgttgcgttttttctatttcctttttcaatttttctttgtttttagcagatattgagtctcgttcagaaagctttgaatccaatatctttaaattattttctttattttcgacataataatctaaattatcttttacttttgaatggtttgtcgtaactttatcgatgtcttttttaatttcgtctgattgttgcatttgattactcttagtattagatgtatctttaaatgctaaaccgtcttggttgttttctttaacagcgcctgcgtctttttctgaagccgtatttttattttcttcactatcattcatatctgctatatctttactttcttcatttagtttacccatatcaactaaatgagatatatcttgctttgtatctctttgatttaaattagcatcaaacgtattatcttgcaggtcttcttgatcgaacaagtcaatactatcttgttcttcaatatggttagacttttctttaacagaagaaactatattttttttactatctaactcacttttcacacttttcttatcttcagatacttcctttttgtcattttcaattaaatgactctgcactctattctgttcaatgattttattatcaactttttttgctttcttcaatattgcttcaacttcttctgtgcttttagcttttgtaatttctttaatagaagcatctttctgactatctttgatgttttttaatttatcaattttctctttaccttcttgaatgcgttgttctagcgtattttcactattcgaatgcgtctcaatatttaaatcagccttatcttttgcttctactgatggtgtcgaagtcatactataccccatcaaagaagtgctaataatgagtgccatagtagaaaatttaaattgatgatttaatctggttttattacttaaattattataccttaactttttcattaaattcacctttcttctaattattcatcctcattatataggttatataactttattcaaatagcaatattgctatactatatcattaaaaaataaattttatgtccaaatttattgataaatcaacttatatttaaaaatgaaaatgattatcctaagttgcgatgatacaaatataaatgctacaagttattcaacttgtagcatttatttaatgaatatgatcttttaaactattattagccaccaaaaaaacggctccagaagccttttttagatttcgtttcttcacccttttcgtctatatcagtatcgttgtcatttgaattagatggaacatctttttttgtgattcttcttgcataattttatcgcttttactttcagatatatccttgtgtggaacctctgtttctttttcctgatattgattaatatttacagaatcagaaggtgaagttctatttggcgatactgttgctatttttggtgcaggtccaatcggtttattaacagtcatagcagctaaagctgcaggtgcaagtaagatatttgtttttgatttatcagaagaaagattgaataaagctaaagcgattggtgctactcatactataaattccggtgaattagatccaagtgatgttattaataaacatacagataatggagttgatgtagcatttgaagtagctggtgtagcactaacacttaaatctgctatagacgttactaaagcaagaggtactgtcgttatagtgtctatatttggtcatcctattgaatggaatccaatgcaattaacaaatacgggtgtaaagctcacttcgacaattgcttatacacctactacatttcaacaaacaatagatttaattaatgaaggtaatttaaaagttaaagatgttattactgatgagatagagctagatgatattgtcgaatcaggatttgaaaaactcataaacgataaatcacaagcaaaaattctcattaagttataaaaattaataaaagagcctctctaaatttagggaagctcttttattagctaaaatatagttttatttagtcaagaaatttgtgagtttttataattcattaatctaaggattgttaataaagttattatttaataattgtatttttaaatacaaaactaggttcggcacctaaaataataagaaatatttgtgagtagttcacattttggaattttaacatcatatctttaaaaattacaaaattactatcttttttaacttttttaacttcttgttcatataattttaaaacagattctcttattaaagttggtcgcttattttgaataatttcacggttatctgaaaacattagtaatcctaaatatttataatggatacttaattgtcttgtcaaactagctatatattctaacttttcatacatattaggaaacttgtttcttagttttttcaaatctaacttaacttggtttaattcttccatttcatttatcattttatcactactccaattcccatggtttattgatatcaagagactcaattatatttttagtttgtgatcttttaatttttcgcattttagctctttcttcgccatccataaataataatttttcttctttggactgaggagagattttgggtactttaattggttttttcttttcatccaaagctacaaaagtaagaaaagctacagcagcaatttttctttctgcagtgatcatatcttctgaaatgactttacaaaatatttccatagacttttctcctgtataaactacataagattctatacaaactgaatcagattgggtgattggatataaaaattctactgaatctgtagaagctgtaacacattctttaactcttgcatgtcttctagctgaaagcgttgcgttattatcaatttttttcatcaacacccccccaaatagggtattataattgtttaaatcattaattaatacttgatccgtactgacaattttactgtcactaggaaatttataattttccataaaaaactcccgtttctataatgtttatgttctaattatagagcgagagtatataaatataaaatatcttttttttatacagctataaatttctcaaatacctttatatttaatagttaattaagaagttttcttggagaaatttaatccaattttttgttaaagaatcaactataatatcttttctccaaataataccaagttcccatttcatggaaggttcattaatatcgatggcttgtaaattattatctaataagcctagtattccttcgggtaatatacatatccctagattatttaataacatttcttctatgaagctccattgggtggtttcaaaaattatattaggattaaagccataatttctacatgtatttttgattttatcgtttaaatagaaatcagaattgaataaaataaattcttgttcttgtaaatcttcaatatcaatctttgtttttttagataattcatgatttttatgaacgaccagttttaatttttcttctaaaaaagagaatatatcaaagtttttattatttgtaggaagtacagtaattcccatgtccaaatcaccataatatacatcgttttcaatttttttactaccattttcaaaaagttgaaaagttatattaggatacatttcatgaaattccgaaattaagccaattaatcttcttatattaataatagtagggattccaattttcaaatgtcccttttttaattctaataaattacttaactcattagggatattatcatacattttaagcatttctttacattggaaaaagaaagcttctcctgcgtcagttaagtatatttggtttttatacctattaaataaatttacatctaattcttcttctaataatttaattgtattactaattgtgggttgtgtgataaaaagattagatgctgctttggtcatacttttttgctttacgacttctacaaaatactgcatatgtctaagttccaataaatttcctccctttttattatttcttcacgttaccagttttttaaactaattattttttattattctgtataccgttgaacgactaacatctgtctgtttagcaatctcttcgcctgtaagtttttgttcatcgtataagaatttgatttctcttttcttataatctggcaaagaaggacggccgccttttctccctcttgctctcgcagcttctagaccttttttcgtacgttcacttaataagttagcttcaagttctgcaaatgcactcatcattgtaaaaaacatttttcccatcgcatctttggttgacacattcatatcaataatatgtaaatcaatgccgttttcatctaaccattgagacagatcaattaattgttttgttgtacgtccaagacgatctaatttatagataactaggatgtctccttcacgtaaatagtctaaacacttatcaagttctgttcttttcgttttgcgaccactcactttttcgctaaagatacgttcacaaccatagtctttaagtgtatcaatttgtccatcaagactttgatcttgtgttgatacacgtgcataaccaattttagccatttcaataccacctcttttaatcgttttatgggcacttattaataaaatctatttctcgatgcaaataagcacgtctctcatcgtctgaaaactcatgatttttgatattttcgacacattgattatagcacaagtttatagacttaaatatccaagaaaaacctcttaattttaatttaagaggttttgtgtcaaaaacgaacgatttttctaactagaattttaattatagacataaatttacactctttataattctaggctagttattttttatgaaaaactttaatgtacttttgtatatttcgtgttagttattttatgaattaatcatgaaaatgtagattagtatccttataaaacaattaactcataatcagtatttaaaacaagctaaactctattttttctttgttagtgttaactgaacaagcaaagtatcaattaaagagatgatataagaaatacgattattataagaatcattatcatattttatgattaaaaagcattttgttaaagaaaggacttactattaactatcttatttttcattcattttattactttaaataaactgtaattcataaatgttcttatcttcgtagttattgaatgcatctatatgcccttttaacaatatttcttgtttttttctactcacattatgataataggataacttaatattcatattggattcgtaaccgttattttttatagtatcttctaattcatcaaatactgtcttatttataggcaacatataaccttctttactaggtaacatattaacatactttttttgaataactttatcttcacctaataaaacttcaatggtgattttttttgctgcaccgcctcctaaattatataatttcaaataatcttcattttcttccacattggaagtggtgttttttaaacttaatttttggtctttatctctaattaataaaatctgattaaatcctaatgcaggaataaaacttattttcatttggtaaagttgaactgatactgatacaaaataaaataacgccataataaatgttccaagcgatcctatcgctgatataatattaatcatatttagctccttttcttttttaggaaatagtagtaggaaattaaacatagcataaaacaatttatattcaacaatttatgaatataaatttcatattaactatataaaaacgagcattggataccaattttttagtattggataagaacttcccttagcacttataattagtctagctctcaacgtagttaccggcacaccatatgctcctaaaatgtctttacactctaagcgacttcttaaacatggtggtaattcattcgtatttggaattaggccactcatgaatatgatatgtttaactttattaaaaccttgatgctttagtaaaattatctgctaatatttcatccgtatctttaaaacttgcttgtgttaacttagctgaaggtatgatcgaatgaacaagatatatagcgatatctacttttttcattacttctgttatctcatttaaatcaaataaatctgaagatttccatgtaacattttgttcattagacttattttctatatatgctgaagcacctgttaatagaattttttcgtaaatttagcctccaattttaaaatgagcaggcacatacttgcctcagctaatctttttcataataagctaaattgctcattataattaaattaatttgatgagtatcagaagtacgattcacataaaaaggtacgacaagtttatgagcttgtcgcacctttttaatgacaattagttactaacaaacgactctaaaagcctttttaagttgtgtttatttacccttttttcttcctgatgttgattaatatttacagcgtctgtagtatatgatgtttcttacacatctacgttttatctatcattagtaggtgtatcaaaggaataattaagcagcctctcttcttctaattgatttttgaatcttttttattactctctaacgccaaaacttgctgattcttaagcaatctttgatctttcctgcaactcttttctattctggctcatatatgcgttttaagaaacaaatgtaattgaataggttaaaaattatatatttttaaagtttgctttaaaccaactgttaaaatgtataataaggatactggattaccacatgtaaatttgtttttagcacgacgttttttaggtgtgtaagtatgcctttagatataaaaataaaagtcaacctagaaaaagtagattggctttttcttttgatgcagtatcgtcaatgtaaatctaaaaattatggctataaatctacatcacttttcaaaaatgtagtcgtgatattcaatactaattaatttttataactactaggaaatatctcaaggcgtttctttaaattaaaaacaccccacaaataaatgtggagtattaaagtgaatatcttttgtaggttttattccagattagcatgattttgctgcattgtttcttcatcaacgtttatctcagtcattaaatctaaaacaatactatctaaaaacacttgtgatgcttgttcaaataggctacctagaggttgtgctgaaccttcagtatcatatttcgttcccgccggtaattcaatcactgcatttgcaagttcaccaatctttgacgttggatttgttgacaataatacaacttctgcacctacagctttagctttatctgctaataatcttaaatgctctgtcgaacctgagccagaaaggataacaaacaaatctttttcggtaatggaaggtgtagtggactcaccaactacatgcgcacccttcccaagctgattcaatctcatcgcaaaactatttgctacaaaacccgaacgtccttttccagatacaaaaacttgctctgctttaataatttgctttaaaaacgtttcggcttcactgtctttcacatgtgataatgtgttgtctatttcatctagtattaaacgataatttgtgatttctgtcatcattattttccttcaatcgcagctctacattgtttagcagcttctacaggatcatcagcatttgcaatgccgccaccaacaataattaaatcaggattttctgcaacaatatctttaattgtatctggtttaataccacctgcaactgctactttagaattactaattacagatttaactttacgtaaactttctaaaggagattgaccttcagcttgtaagtcataaccagtgtgaacagcgatataatcgcgcctaaaatcaagctatcgaac

SEQ ID NO: 44 - DNA, 220127 bp, Staphylococcus saprophyticus
  misc_feature (51534)..(51534): n is a, c, g, or t
gttaaattattcatcactatcatactaatgttataatatttttatcatcatactttcgagtaaatatataaatgctagatagagcgttttaaagaaatagtagggggacaaagtacatgatattagataatgtaaatccaaatgatttatttccaactgagaaaaaaggaccaactgttctaggcacaatagagtattcagtacaaggttcgactgaatttgagggtgcttttatagctacaaatgagagaatcattttaaatgttgatatgaacggtgaattttattatagaagtattgcatataatgaagttgaaaaaattgaatatgatggagaaaaaattaatttcacttttaacattgggcctatgcctatgaaaaatattcaaaaaggtgacgttgctacatttgtacaatatgttagtgataaaattgaccaatagttcactgggaatatgagatacaaacaaataaagaaataacaaaaagcgtagatgcacaccatggcatctacgctttttaatatgacaaaattaagttttatatcgtttctttattaaatttcaaagtataaatgataatgatacttacagctattattaaaatgggcatcgcattttggacaagcttctatcatcatgtagtcattaattgtcatttcatgattacagacaccacataaaatagctttttcgtgaaattcatttgcttgccatcgctgaatcttatgtgattcatgttcattgtggcatttataacaaggatagtatttattacaacatttaaacttaatggcaataatatctaaaggtgtttgataatgtgtacagcgtgactcattatctacagtggatccatatacttttaccatagtgatttctcctattgttcattgagtgggtgttctccgataattctaacttcagggtgcagctcaacatcaaatttttcttgtactattttttgaacgtaatgaattaaatcttcataatctgttgccgttcctttatctacgttaaccataaagccagcatgttttgttgaaacttcaacgccaccaatgcgatgaccttgcaaatgagcatcttgaatcaacttaccagcgaaatgaccaggcggacgttggaatacactaccacatgaaggatactctagtggttgttttgattctcttctttctgttaaatcatccatagaagcttgtatttcttgttgatcgccaggtgctaaggtaaaggcagcttctaatacaacgagatgttctttctgaacaatactattacgatagtccaactcaagttctttattggttaacgtgattaattcacctttgttattaacgcaaagtgcataatcaatacagtcttttacttcaccgccataagcaccagcattcataaatacagcgccaccgatggaaccgggtatgccgcatgcgaattcaagaccagttaagccatggtctcttgcagcacgtgaaacatcgatgattgcagcgccactacctgaaatgatagcatcgtcggacacatcaatgtaatcaagtgaaagtaaactaatcacaataccgcgaataccaccttcacgaataataatattagacccattacctaaatacgtcacaggtatatcatgtgtgtaagcataatgcacaatggcttgcacatgttcgttgtgggttggggaaagataataatcggctttaccccctgtttgagtgtatgtatatttttttagaggttcatcaattttaataatttcttctgggacaattgcttttaattcttttaagatgtcatccttatgcaactatagaacatcctttcctgttgaattcatttattcattataccaatgatttggagtctttgctaaatactatggtaattaattttgttaaattattaatacaatgatcatcgtgtgtttaatattgatgtgtggctatatttcataatccatatttaagttaatttactgtgtgagagaatgaatcaaataattgttgtttcttgttttcatatgcacgtatagatcgaacttcattagctaacatcaatttcttagaaccaaatcgtgtagcggtgtgttgatcatgagacaattgatgatgcgtttgaatatacgctttgtagaggttagaatctttttgaataatatgtaaacgtgctatttgttttaaatctattaaattattaaattgtgccataattacttttttcttatatgaatggtgtaaacgataaaaaccttcataattcaaacgtttttcatctaaagcggtgatatcatgtaaattatctacgcctactaatatatctaaaatgggttcagtaacgtaattgaaatgtgatgttccaccgatatgaagtgtagttttaacaggtgtgtcgagcaggttaaaaagcatttttttcaaattttgatattggtctgcaaaataattatctttgtcctcagaaataaatgcttggatgtttgaattcatataggttgttcactcctttctttattgtgatataactgttaaactgtaaattctgaaataatatatcacatattattttcaagttaaataagtttctgtataatactgaatgataaggagtgcagaaatgaaaaaattactttgcattgttttgttgtttggctttgtgataacccttggtgcatgcggtaatgaaggtgctaacgaattcaaagattttgatagctcactgaatgatgtgaaaaataaggaaaaagaacttaatcatgtcatggatgacatttcattgaagcaattagatgatttaagtaaaacagatacgactgataaggataaaaaagcatttaatgacttgcaaaataacattaatcgcaaattaatccctaagttagaggaatatgagacagcagctaaaaaattaccggcagaatctgaagaaacgaaaaacttaaaatctacctacttaaagtcagtcaaagataagaaagcagctattaacgatttgaaagtatttgttgatttatgcaatcaagcaattaaagcaaatgaagatattttagaatatacgaagttatttgagaaaagtagatctcaagttgaagcgcacatgcaagacgcaaatgatgcaggcgcacgcacagatgttaataatttcaaacataaattagaagaaaacaacaaagaattgagacatacagcagaaaaagagttggattcaacagattcagctaaagttaagcaatcgattgaaaaagacatcatgcctttaattaataaacaaattaaagatttaaacaaagctgaaattacgaataactatgtaaatagtgcgcgtaaaaatgcgattgaaatgtattacagcttgcaaaattattatgaaacacgtgtagaaacaattgatattagtgatgagttatcaaaaatagatcataaaactttacctaaagaaagtgaagatttagaaaaatatgatgccgtatttgataaacaatataacaatgtaaaagaagactataattaacaaagaaatttgtattgttataaaaatttaaataaacggttaacaacaaaaagagtattgtgtataattggaaacaatgatatgagtatatcctggagatttcacactttttgaaacaatttgggtgtgttaaatatttttagaggtgaatagaatggctataaagctgagttcgattgaccagtttgagcaaattataaaagaaaataattatgtatttgtattgaagcacagtgaaacgtgcccaatttcagcaaatgcaatggatcaatttaataaattcttatatgaacgtgatatggatggttattatttaattgtgcaacaagaaagagacttatcgaattatatagaagaaaaaacaaatgtaaaacatgaatcgccacaagcattttattttgttaagggacaggcgatttggaatgcgagtcacagtgatattaacgttacgactttagctaacgctgaagagtaaaacataacagaatatgcaaaaaaacgcttgttaaccgcttctctaaatgaaagtgattagcaagcgtttcttataatgtgaaaaatgttcatctgacatgtataataaatagttgaatatgaaatatagactactactttattgggaatgactatatgtggctacttatagatacaggtagtgaggttaggatagctaacacatgctataaatagacttcgcagacgatggccaacatatttatctgttgcctacttcattaaccaagaccacaaatttttgtggttcaatctggttgaaaatgactttataatagtttatgtttcattatacaaaaatacaaaaatgaattgataaaatacttgaggtgacaatatgaaagttttagtggcgatggatgaatttaatggaattatttcgagttatcaagcaaaccgctatgtggaagaagcggtagcaagccaaattgagaaagcagatatcgttcaagtgccattgtttaacggacgccatgaattaatggattctgtctttttatggcaatcaggaaccaaatatagagtgcctacacatgatgctgatatgaatgaagtagaagccatttacggtattacagatagtggtatgactgtgattgaaggtaatttatttttaagtggtcaaaaaccgataaatgagcgcacgagttttggtatgggtgaaatcattgctgatgcacttgaaaatgatgcagaccatattgttatatcattaggcggtatcgcaagttttgatggtggtgcaggcatgttacaggccttaggtgctaaattttatgatgatgaagctcaagaagttgatatgcgtgaaggtagtcgtatgttgaagtacattcgaaaaatagatacttctgcattaaactcaaaattaaaagatgttcgttttcaagtaatgtcagattttgatagtaaattatatggtaaacatagtgagattatgcaaacctatgaaacttatggtttaagtagagaaaatgcagcagaaattgataatttaatttggtatttaagtgaaatatttaaaagcgaactcaaactcgcgcttggaccgattcaaagaggtggtgcaggaggcggtattgctgcagtgctaaaagcgctttttgatgcagaaattatgacaagtcatgcattagttgaccaaataacacatttagattcattgattaaacaggcggatttaattatttttggagaaggtgtcaatgaagaagaccaaatattagaaactacaactgttcgccttgcagagttagctacgaaatatgacaaaccatcgattgcaatttgtgcaacaccagataaatttgatttatttgaatcaatgggtgttacatcaatgtttaatacatttattgaaatgcctgaaagttttactgattttaaaatggggattcaaattagacattatacagttcaggcaattaaattactgaaaacacaattcagtacaaattaaacgtaaagtgaaacaagcatatcttattttaagtcgtataaactaccatttatagcaatttaatcaggaactaatacttagattagttgcataatggggcgtatactgacaggatgtatattttagatatgtggccatgttcaaagtaataaaaatagagctaatccatatcggattagctctattttttgtatttgtgtcataggcgctacatgtttaaaagtaaaaacaactacttttagtattacttacttatcgtaagtatttacaacttcttcagctataccgactacaacttgtactgctttttccatgacatcaatagacgcgtattcgaatggtccatggaaattgtcacaacctgtgaaaatgtttggtgtaggtagtcccatatatgaaagttgagaaccatcagtaccaccgcgtattggtgcggtatttgctggaatgcctaatttttcgaaaacacgtttaggtatatcaatcacgtgtgggttaggttcgattttttcacccatattgtaatattggtcattaatttctacttcaataggttcatcttcgaaatgtgagttaatatcattttttatttcgacgagacgttttttacgtaattcaaattcgtttctatcatgatcacgaataatatattgtaaggttgttttttcaacatcgccatttattttcattaaatgataaaatccttcataaccttccgttctttctggaacttcattttgtggtaataaagcattaaattgctgacctaataatacagcgtttatcatagcatctttcgctgatccaggatgaacgttcacgccatggcatgtcacgatcgcttctgcagcattaaagctttcatactgtaattctccgtactcactaccatccatcgtgtatgcgaaatcagcattaaaacgttctacatcaaattcatgtggacctcttccaatttcttcatcgggcgtaaaggctacgcgaattttaccgtgtttaatttcaggatgtgaagttaagtattttaaagcttccataatttcaactacaccggctttatcgtcagcacctaacaaagaagtaccatctgtaatcattaatgtatgaccttcaacgtttttcatagcagggaatacatcttggcttaatgtacggttcgtcttacctaattgaatcggtgtcccatcatagttgtcaataatttgaggatttacatgagacgcgttgaagtcaggtgaagtatcaatatgtgccaaaaatccgacagtaggtaaatcgatgtctacattactgtctaaagtagcaaataagtaaccttgttcgtcaatatctgtttctaatcccaaatcagtcaattcatcgtttaataaatttaataaatcccattgtttctcagttgaaggcgtcgttgtagattctggattggattgtgtgtcgattgttacatatcttgtaagtcgatcaattatgtcttgtttcatttaaaaacaccccttaagctctattatttatattataagattttttatatgttttgcctttcattttaccataatgctgtttaacacgtgtatagatataataaatgatttcagcacataatataccgaatgcaatagctccagagattaacgtgacctcaaggaaggtattcaccgcatgcgtatactgattacttacaagaaaacgtgtggcttcgtaagctaaaccaccaggtacaagaggtataattcctggaacgataaagataataacaggacgtttataacgtctactcatgacatgactcataattgctaaaataaaactacctaaaaatgacgctaacactttacctaaatcagcatcaaaggataatttataaataatccatcccatggcaccaacaaaaccacaggctaaaaggaggcgtctaggtgcattaaaaagaatagaaaataacattgatgcgaaaaagctaatcataaactgtaaaaagtaataaacaatgaacattatcagcactccttttctaaaagattaataagacgatggcaacaccggcaccaattgcaaatgaggttagtgcagcttcaacgccacgtgacatgcctgcaattaattcaccagccattagatcacgaattgcatttgtaatcaatataccgggtactaagggcataacaccggcaatggttatgatatcttggttgtgtgcccaacctattttagtgaagaaagcagcgatagctataacaacagctgcactgataaattcagaaaagaatttaatttgaatatagcgttgtacatagctgaaagttaaaaaggcaccagcaccagcgataattgcaaatataaaatcattaatgacgccaccaaacataaataggaaaaagccacaggcaattgctgctgcaacaaaattggtaattgatgaatactgcaaggaagcatggtgtaaatggataagttcagattttacttgatcaatatcaagcttgttactagatattttacgagacaaactatttgttaatgcaattttttctaaatctgtagtacgttcacgaattctaatgagtcgtgtatttgtacgattatttaacgaaaaaatgattgcagttgatgttacaaagctatatgtatcatctaaaccataacttgcagcgattcttgtcattgtatcttcaacacgatacgtttcagcaccgctttctagtaaaattctgcctgcgattaatacgacatcaatgactttatcttcatcaatgatggtaattgaatctgacatagcttcgcacctcctgaattgttaatagaacaattgaaagtttacattgtcgaataaaaactttcaatagcgtatcttacgataattaatgttttatataacattatatattgtaacaaactcattttcattactatacttattcaatgctttaattgaaactttatttagaaaaagtaaaacatatggatgaatcgcgctgtgtgaagggcatggtaggtgaaagaaacgttacatttatttttacgaaaaaagagtttgagacaaaaatagatgtctcaaactctttttcatttaggcgataggtggctgcattgaaaatgtaaagtcccactccctataatttaacaattgggttaaacatgacttggttacggccttcgtttttagccatatgcaacatatcgtcagcaattttaaacacttttcgttgtgatttgtaatcatctgttgtcaagtatccaacgccaatagatacggataatttaatgacttctttgtttggtaaatggaatgtagattgttctacaccgccacgaatactctcacttaatttgacacattggtctaaagtataatcatacaaaacaatagaaaattcttcacctccattacgataaatactaaactgttgtggcacatagtttttaagtaattgagccacttgtctgagtacagcgtcgcccgatttatgtgaatacatatcgttcacatctttgaaaccgtcgatatcaatcagtaataaacctaaactttggttattttcttcagataaacgagctgtttcatttaaatgtctatcgaattctttaacattacctaatccagttaagtaatctactttatcttcgttctcatatcgattgactaatgagaagaaatgccaaatatcaacaaaggtaatagacgaagttattgttaagacaaatgaaatcggaattaaaaataagacttctgtaatctcgtaatatgggctgattaatgataaaattgcaaaaataactaatgcaatgacatttagtatttgcaatgaaatgatatcactttgttttaagaatggacctatcgcaccaatgatgcctgctattacgataaatatcatagcagtaattattgtataatccccaatcagaacattgactaagccgacaataaaggcggatagaacagtgtaaaacatattcgtatatctacctaaaaataggataggtacaaaggataaatagagtgtatactcattgaatattgggacagggtacgcagatagtaaaagcgctactatcgtcattaaaacagtgacatattcttttgaaaataccataattctattttctgagtattgtagacgatggaataaataaattccagctacggtaacagaaatattatagataatagcttcaaacatttttactttacactcctttaaataaacacttagttattgtaagtgaaaacttacaatttgtcatcatggggtgaatagaaaattctaacattcacttaatattcatgttaaaattattttttagtgaaaaattaaaaattcactaaaattgatttaataaataatatccctaaatataacgcatttattatcgcacttctagttgtataagtaaaagcgtataaggtattataaagttatgtaaaaatatcaattgtgtaatgagactatatttttattaggaagtattaaaatagtcatttttgaagtgaattcacaatttaatgaaacaaatattttcaacatagactttgaaatttaaaataattaagaaccatattaatgaaggtgaactgatgtatacattattactaatcattttttcaatgatagtcagtttaatacttacaccaatagtcataaaagtttctcataaattagggattgtagatcaaccgaattttagaaaggtacatactaaacctatttcagtacttggtggaactgtgatactcttatcgtttttagttggaatttggcttggacatcctatagaaactgaggtcaaaccgcttgttattggatctgtattaatctatttggttggtttgatagatgatatctatgacttaaaaccaattatgaaattactcggccaagtaattgcggcgttagtcgttgtttactatggtgttacaattgactttatttcattacctattggtccaacgatacattttggtatatttggtattccaataacggtcatttggattgttgccattacgaatgcgataaatttaatcgatggattagatggtctagcgtcaggcgtttcaatgattgcactgatgacaattggctttatagcaatattacaagccaatatatttattataatgatatgtagtgtattgataggtgcacttttaggatttttattcttcaatttccatccagcaaaaatctttttaggtgacagtggcgcactattagttggatttattgtaggctttctatcattactcgggtttaaaaacattacgtttgtatccttattcttcccaatcgttattttagcagtaccatttatcgatacactattcgctatgatacgtcgagtgaagaaaggtcaacatattatgcaggccgataaatctcatttgcatcataaatttttagaattaggctattcgcatcgacaaaccgtgttattgatatattcaattgcgatactgtttagtctctctagtattatattatacttatcccaaccttggggtgtattcatgatgctcatactcatattcattacaattgaattgattgtagaatttacaggattaattgatgatgattacagacctctattgaaattaatagaaaataaagagcataataaagatgaacagtgatagcaatgaaattgtgaaactataaaaccgacaagtcagaggttactgacttgtcggtctttttgtacgattcggtttgtttaagtacttgtaaaataagacatatatctatcatttatatttaatctgttggtatatcaaacggtaacctcatgacttcgccttctactaaatcataattaccagacgttgttctatttaaaaatgcaataaattcatcatagtcagacgcgacaacatctatttgataacttactttgtctgtataactttgatcacgtaataaataggacgtgctttcaagttcatattcgaatttccctgttaaatcataattaatggttacagttgtaggtatagcgggtttaagttctacacgaccaatatcgtaaataacgtctctaacggcaccactataagcgcgaataaggccgccgccacctagtttaatgccaccaaaataacgtgtaacaaccacgcaagcattatgtatttctaatttttttaaaatatctaacattggtacgccagcagtaccgcttggttcaccattgtcattggctttttgtatattcatttgatcgccaattgtatatgcagaacaattatgtgctgcttcacggtgttttgtagacacttgattaataaaggctttcgcatcttcttctgattctactggtttaatatgtgcaataaaacgagatttattgattacattttcaattatatgttctgcttttatcgttataattgtgtcttccatgtgtaaccctccaaatgtctatagattttatccattgtaataatttttattatcatcgctacctttgtattatacactgtattgaatacaagcataaatgtaaaaataaattttcttttggttgaaaataaggtatcatagttgtgagtataattgaggaggattaggatgaagattgctgtcttgacagattcaacgagttatctatctcaaacattaatagacaaatataatatcaaagttgcaccacttagtgtcacatttgatagtggtgagaattatgttgagaatgcatccatttcaacagacgaattttatgaacgtatgaagacctcagctacaatttcaacaacgagccaacctgcaattggagattttctggagaatttcgagcaacttcgcgaagaaggctatacagatgtcatttgtgtatttctttcttctggaatcagtgggtgctatcaaactgcgacacaagcaggtgaaatggtctcagacattaatgtccatacgtttgattctaagttagctgcgatggttgaaggtggatatgtacttaaagcgatagaaatgattgaacaaggctatgagcctaaagctatcattgaagcattacatgcaatccgtgaagtaacaggtgcagtactcatggtagatgatttgaaaaatttacaaaaaagtggtcgaattacaggtgcgcaagcttggattggaacgatgttgaagatgaagccagtgttaaagttcgaagatggcaaaattgttccagatgaaaaagtaagaactaaaaaacgtgctttgcgtaaaatggttgaaaaagtgataaatgaagtcaaaaatctagatgaagttacgttatttgtaattgagggtgatattcctgaagattcagattggattcaacaagaattagaaactaactatcctcagtacaatatttatcgttctagctttggaccagtcattgctgcacatttaggatctggtggtattggtttagggtatattggaagtaccattcgcacagattaaattaatgaataaattagagacatgtcacgcctattgggtgttacatgtctttttttggaggtaaggcaaataaaatattatggtcgacttatgttagataaaacgttactgaccgatgaaatcattgataagacttcaactggcattataaaaaaacataatcaatggcagtgtatgcaatgtcatacgaaagaaccgcgtcatttttataattattattcaactatattaaaaaaagaaatagtttattgtagaaattgtatcaatttaggaagaatggataatgtaaagccaatatttattacaaaatctaaaaatgttgcgtctcagggcatatatcagttagatttcaaactgtctgaacaacaaacttttgcatcgatagcaattctaaaggcaattaaagattatgaaactaaaattttatatgcagtcactggtgctggaaaaacagaaatgatatttgaaggtattcattatgcgcgtagtagaggggataatgtcgcgattgtatcaccaagggtagatgttgtgatagaaattagtatgagaattaaaaaggcattttcttcagaacagattgatgtactttaccaaggtcaaacacagcgctttgatgggcactttatcatttcaaccgtacatcaattatatcgattcaagcatcattttgatttaattattgttgacgaagtagatgcatttccattagtaatggatcattcattacaagaagcgattactcatgcatcaaaagcgacacactgtcatatatttatgacggccacacctcctagacatttattaaagaagatgaatccgtctgatgtcatcacactacctgcgagatatcatagacagccattgcctgtaccgcgttttaaatatttcaaattaaagcaacataaaatacaatatgcattgctgaagatactaaaaaaacaaatcttaacagagcgttatacactcgtgtttttcgataatatcaatttaatgaaaacagcatatcatcgctataaaaaggaaataacgtcattaacttatgtatatagcgaagatgccttaagatttgaaaaagttaaagctttaagaaatgggggataccaagtcatttttactacaacaatattagaaagaggatttaccatggccaaattagatgtcatcgtctgtaatagccaaatttttaataagagtgcgttaatacaaattgctggtagagttggaagaaagatagaggaaccaacagggctcgtattatttttacatgaaggtattactttacctatgttaaaagctcgaaaagcaattatagatatgaatcagttagcactaaaaaaggagtggattgatggctaggtgtatacaatgtgatgccaagttatcagaaatgttcgatgcgcttaatttttataaaaaacctgtaaagatatgtgtaaattgtatagaactatgggaagaaaacaaaatcgtattggaaggtcgttgttcaaaatgtctaaaaaaacttgatcaaggggagcataaatgtctagattgtgcgttcttagctgctaaatttccgttaatgaatcaattatattgtaattatcaatataaaggcgtagtgaaacaactgatacatcaatacaaattgttaaaagatgtagcaatttgtgaaattttggcagaacaactcacactaccgaaacagtcttacgatttaattattccaattccatctcctgtagaaagagatatcaatcgcacctttaatccagttacttgtgtgttagataaactgcgagtaccatatgaatctatacttcaaactaaggtgaggcctaaacaatcattattaggcaagctacatagagcgcgacttgataatccatttgaagtatcaaaagatatcaatttagaagataaaagtattttacttgtggatgacatttatactactggcttaacggttcatcatgcgattgaaaaagtatatgttagaaaaatcagaaaattcgatgtgtttacgtttgcacggtagactaaacgtggtattatattagtaagcaatattaccaatatagaggttttaaaggagtcgatgattatgatcagatttgaaattcacggagagaacctcactattactgatgcgattcgcaactatattgaggagaaaattggtaaattagagcgttattttaatgatgtgccaaatgcaacagcacacgttaaagtgaaaacgtatcaaaactcagctactaaaatcgaagtaacaattccattgaaaaaggttacattaagagctgaagaacgtaacgatgatttgtatgcaggtattgatttaattaataacaaacttgaaagacaagttagaaaatacaaaacacgtgtaaatcgtagaaatagaaatcgtggtgagcaagaagcatttgcttcactaccagaagaaaaagaagcagttgaaattcaaaatgatgaaaatgaagcggataatgaaatcgaaattattcgtgcaaaaaatttcagtttgaaaccaatggattctgaagaagcagtgcttcaaatggatttattaggacatgatttcttcatctttacggatcgtgaaacagacggtactagtattgtatataaaagaaaagatggaaaatatggtttgattgaaacaactgaataagacgtttaatgtaaggtaagtagcatttatactatagcgttcacgatgatgttaaatcgtggacgcttaatttttgctatgttactatgtaataatttgaaagtgatatagctatttgtgtatatttttattgaacaagattataatcaattattttaaaataaatagaaatgtaagtgaacaagaaatataatttcaatgtaagacactttagacaagtcaataagtgtaaatttaagcttatagatgatatcataaattgttgtaagcgaagagttaaaaagctaaaggagcgaacagaatgggttttttatcaaaaattgcagatggcaataaaaaagaaataaaacgccttggtaaattagccgacaaggtccttgcacttgaagaggatatgtcgatattaactgatgaagaaattaaagccaaaacaagcgcattccaagaaaaattacagagcgaagaagatataaaaaaacaaaacaaaatattggatgatattttaccagaagcatttgcattagtaagagaagggtcaaaacgtgtgtttaatatgattccttacaaagtgcaagttatgggtggtatcgcgattcatggtggcgatatttccgaaatgagaacaggtgaaggtaaaacgttgacagcgacaatgcccgtatatttaaatgcgttaactggtcgcggtgtacatgtcataacagtcaatgaatatttatcaagtgttcagagtcaagaaatggctgaactgtatgaatttttaggactttctgtaggtttaaatttaaatagtaaaacaactactgaaaaacgtgaagcatatgcgtgtgatattacgtattgtacaaataatgaattaggtttcgattacttgcgtgacaacatggtaaattatgcagaagaacgtgtaatgagaccattaaactttgcgattatcgatgaggttgattccatcttaattgatgaagcacgtacacctttaattatttctggtgaagcagagaaatcgacatcactttatacacaagcaaatgtgtttgcaaaaatgcttaagagtgaagatgattataattatgacgaaaaaacaaaagcggtacaattaactgaacaaggtatcgataaagcagaacgcatgtttaaaattgataatttatatgatgtaaataatgtagatgttatcagtcatatcaatacggcactacgtgcgcacgtgacattacaaagagatgttgactacatggttaataacggtgaagttcttattgtagaccaatttacgggtcgtacaatgcctggacgtcgtttctctgaaggcttgcaccaagcgattgaagctaaagagggcgtgaaaattcaaaatgaatctaaaacaatggcctcaatcacattccaaaactatttcagaatgtataataagttatctggtatgacaggtactgcgaagaccgaagaagaagagtttagaaacatttataatatgacggttacacaaattcctacgaacaaaccagtgcaacgtgttgataaaccagacttaatttatattagccaaaaaggtaaatttgatgcagttgttcaagacgttattgaaaaacataaagctggccaaccggtattacttggtacagttgcagttgaaaccagtgaatacatttcaaatttattgaagaaaaatggtgtgcgtcatgatgttttaaatgctaaaaaccatgaacgtgaagccgatattgttgcaggtgctggtcaacgaggcgcagtaactatagctaccaacatggctggtcgtggtacggatatcaaactaggtgatggtgttcaagaacttggtggtttagctgttatcggcacagaacgtcatgaatcacgtcgtattgatgatcaattacgtggtcgttcaggacgtcaaggtgataaaggggacagtcgtttctacttatcacttcaagatgaactgatggtgcgctttggttcagaacgtttgcaaaacatgatgaaccgtttaggtatggatgattctacgccaattgaatctaaaatggtttcacgtgcggttgaatctgcgcaaaaacgtgttgaaggtaataacttcgacgcacgtaaacgtgtacttgaatacgatgatgttttacgtaaacaacgtgaaattatttatggtgaacgtaatagtatcatcgatagtgatgaaagtggtggtttagttaatgacatgctacgctcaacacttgaaagaagcgtgaactactatgtaaatgaagaagcggacgatccagattatgaaccattcattaactatgtagacgatgtattcttaaatgaaggcgatataaaagttgaagatattaaaggtaaagacaacgaggatatcttcgaattcgtttggaataaagttgaaattgcattaaaataccaaaaagaaaaaattggaacacaatttgatgaatttgaacgaatgattttacttcgttctatagatacgcattggacagatcatattgatacgatggatcaattaagacaaggtattcatctgcgttcttatggtcaacaaaatcctttacgcgattatcaaaatgaaggtcatcaacttttcgatacgatgatgcaaaatatcgaagaagatgttagtaagtatatcttgaaatcggttgtttcagtagaagatgatcttgaaagagataaaacaacagactttggtaaagcagagcacgtttcagccgaagatggtaaagaaaaagctaaagcagaaccttatgtgaaagatgaacatattggtagaaatgacccttgcccttgtggaagtgggaaaaaatataaaaactgtcacggtgcatagttcatagtgacaggttataaaaccggaagttttgatgagcagtcattaactttcggttttattttgtaattaagtttggttaggtatttatttgaattagataaagttgtaattaaaccacaaacttctgtagaatagagttattaacttcaaataaatgaaatacgttatagtttattatttcattcaaataatcataggagagatgcatgatggaattgtcagagataaaacgtaatatagatgcgtataatgaaaaactagaacaacttagggggtctctttgacttagaagcaaaagagacgaacatacaagaatatgaagaaatgatgaccgattcaacattttgggataaccaagaaaaggctcaggacgttattgataagaataatgctttaaaatcagtagtgaatgcatatagaacattagagtctgaacttgaagatatggatactacgagagctttgttactcgaagaagatgatgaaacgatgaagcaagatttagagcaaagcgttcaagattttaaaaatgaattgtatcagttcgagttacaattattacttgatgggccttatgacgcgaataatgccatcatggaattacatccaggtgcaggcggtacagagtcacaggattggacgaatatgctcttgagaatgtatcaacgttattgtgagcagaaaggattcaatgtcgaaattgcggactatttacctggtgacgaagcaggtgttaaaagtgtgacgctgatcgttaagggacataacgcatatggttatttaaaagctgaaaaaggcgtgcatcgtcttgtgcgtatttcacctttcgattcatctggtcgaagacatacatcatttgcatcatgtgatgttatacctcaattcaataatactgagattgaaattgatattaatccagatgatatcacagtcgatacgtttagagcttctggtgctggtgggcaacacattaacaaaactgaatcagcgattagaattacacaccatccaacagggatcgtagtaaataaccaaaacgaacgttcacaaatcaaaaacagagaagcagcaatgaaaacattgaaatctaaactatatcaattaaaaattgaagagcaagaacaagaaatggcagaaattcgtggtgagcaaaaagaaatcggctggggtagtcaaattagatcttacgtattccatccttatgctatggttaaagatcaccgtacaaacgaagaaacgggtaaagtagatgctgttatggatggcgacattggtccatttattgaagcattcttacgcagtcaaatggatcaacatgaaaatgaaggttaagtagccattaaacagctattttaatgaaacataatataagaaagatatatttaaatatgtagagtcagcgcgcaatcttattaaaagttcagattgtgatctggctctttttgtttgataaaggatagataaatatttaattaaatatgtaaaatgcaatctttaatattacgagtaagttttgaaatctatcatctcaaacatgttaaatactttaatggcaaggtttgtggcgtatttatcgacttgtaatataggtgtttgaaatataaagttgactgttatgttacaaaaccataacaatagaaaatctttgtttttattatgctatagtatgtttgattaaaattaagacagtaaaggatgaaaacttaatgaagaaaggtttaacattttctatcacctcggcagccttgttttttggtatgaatcatgttgcatcagcagaccaaatacacacagtaaaagaagatgctaaattgacagatatagcacaaacatttgcaactactacgacagaaatacaaaatttaaatcacttacagaatagagactatgttcaagttggggaaaccatcgtattaccggattctgacattgtagaagttaaggatggagatacgattaaagcaattgctgaaagacatcaaatgacaatgaaccaattgtatcaattgaatccaaatttaggtgaagtcatttatccaggtcaattagttgcggtatcagaaaaaggttcagcgcatcttaataaccaattacagcaaatatttaacagtcatgaagcagttcaaccaacagcacaaataaatgatgacgaacgcaataaagcagaaaacaatactatacgtaatgtgcgtacgtcagggaatatcacgccaagtgcaacgcaaacatggcagaacaatgattattccgcttcggatagacagcaagtttcgaatacaactgcaaatgaacaggtaacttcaaatgatcagtatagcccagtgtcacacgcttctaacggtagtaactattatgattggggtcaatgtacatattatgcttttgatcgtcgacaacaattagggaaatcagttggaaacttatggggaaatgcgaataattgggcttcagcagcacagcaaagtggctatcaagtgaacaacacgcctgaagtaggtgctatattccaaagtactgcaggcaactatggtcatgtaggtgttgttgaaagtaaaaatgcagatggttcaattgttgtatctgaaatgaattggcaaggtgtaggtcaaaaatcatatagaacaatccataacacaggccaatataattatattcactaaaaaaaatctatccttctgtgaagaaaaatgatttgatttgaagtgacgctatcgaaataagagttcgggatatgaggaaatatctcgaacttttaatgtatagataacaagcagagtagcttaaacaaacgattatagcagtatttcaagctgcatcgtttttgatgcgtcatcaatcaccaacgccatagaaacaaatccaatatttttgtactacgcccagactatacctaaatcattgataactataccgttgaaatataacctatttttattatatgagttaaattaaatgattattatttttcaatgatattgataagacatttaacgcgttgaatgatattataaaatcaagaataatcattttttaataaactaggaggcgatgtcatgggtgtacatcaatattttaaacgtttatctgatttggaaaaattaattagattgccgggtaaatttaaatattttgagcataacgtcgctgctcattcattcaaagtgacaaaaatcgctcaatatttaggtactgtagaggaatatcatggtaatgaagtcgattggaaaagtttatatgagaaagcattaaatcatgattttgccgaaatatttactggcgatattaaaacaccggtgaaatatgcaagtggagaattgaaaaaattattttctcaagtagaagaagaaatggtagaccattttataaatgaggaaattccagagccatatcaagctatttatcgtgagcgattacaagaaggtaaagatgattccttagaaggacaattgttgtcggttgctgataaaattgacttattatatgaaactttcggagaaatacaaaaacgtaatccagaacagttattttttgaaatttatgaaatgtcactagagacaatcatgcaatttgatcatcttagctcagttcaagattttatcgagaatatcatcccagagatgctaacagagaaattcataccaagatctgaattgcgtgaaacaacaatggcaattttaaataataggaatgggtgaattccatgatttggtatatattggcatcctttttcccatgtgtttttgttatattattcagtgtgctaacaagaagcaaatgggtaggtacaatattgactttaattttaataggtgtatcagttgaaaaggggttctttcataatgaatggatcattttcatagatgtcgtttcattattagcggggtatcttatcatcgaccaattagagttgcataaaaaagatgatgattgaataataagcattgagcaacctaattgctataattaaataagagatttataataatataacttcaaaaaaaagaagtttttatgatataaaatcaaatggatgcaaacatggtgacatactatgtttgttttttctttataaaaagaagtattaaaactacgaacaaatgtttgtttttgtattcataaatctgttaatatatataacgagtatagaaccattcatctgaataaatgatatgtaaagaatcaatatatgaacgttttaagataaacaaattgtaataggttcgaaataagagatatagacttaattaggaggcatgtgtcgccatggaacattatccgttcaaactgcattctgaatttgaacctcaaggggatcagccagaagcaattcaaaaaattgtaaatggtgttaatgaagggaaaagacaccaaacgctattaggcgcaactggtactggtaagacatttacgatgagtaatgtaatcaaacaggttggtaaaccaacactgattatcgcacataataagaccttagcaggccaattatatagtgagttcaaagaattttttcctgaaaatagagtggaatactttgtaagttactatgactattatcaaccagaagcctatgtgccttcaactgacacttttatagaaaaagacgcttcaatcaatgatgagattgaccagttacgacattcagctaccagtgcgttgtttgagagagatgacgtgattgtgattgccagtgtcagttgtatctacggtttgggtaatccagaagaataccgtgatttagtcgttagtatacgtgctggcatggagatggatagaagtgaattacttaaaaaattagtggacgtccaatatacaagaaatgatatagattttagacgcggtacatttagagttagaggggatgtcgttgagattttccctgcatctagagaagaaatgtgtatccgtgtagaattctttggtgatgagattgatcgtattcgtgaagtgaattacttaactggagaagtattaagagaacgcgatcattttgcaatcttcccagcatctcacttcgtaacacgtgaagaaaaaatgaaatcagcaattcaaagaattgagaacgaattagaagaacgtttagctgaattaaatgcagaaaataaattgttagaagcgcaacgtttagagcaacgtaccaattatgatttagaaatgatgagagaaatgggattctgttcgggtatagaaaattattccgttcacttaacattacgtcctatggggtcaacaccttatacattacttgattatttcggagatgactggttagtcatgattgatgagtcgcacgtaactttgccgcagattagaggtatgtataatggtgaccgtgctcgtaaacaagtattagttgaccacggattccgtttgccgagtgcactagataatagacctttaaaattcgaggaattcgaagaaaaaacgaaacagttggtttatgtttcagccacaccaggaccatttgaacttgagcatacagatgagatggttcaacaaatcatacgtccaaccggtctgttagatcctaagattgaggtgcgccctacagaaaatcaaattgatgatttacttggtgagatacaggatcgaatcgatcgaaatgagcgtgtacttgttacaacgttgactaagaaaatgagtgaagatttaacgatatatttaaaagaagcaggcatcaaagtaaattatctgcattctgaaattaaaacactcgaacgtatagaaatcattagagatttaagaatgggtacgtatgatgtcattgttggaattaacttgttaagagagggtattgatataccagaagtgtctcttgttgttattttagatgctgacaaagaaggatttttacgttctcaaagatcacttgttcagacaattggacgtgccgcacgtaatagtcgcggggaagttatcatgtatggagataaaattactgactccatgcgctatgcgttagatgagacggaacgtcgtcgtacgatacaagaagcatataatgaaaaacataacattacgcctactacaattaataaaaaaatacatgacgtgattagtgctactgttgaaaacgatgaaacaaatgagcaacaacaaacagaagtaccgaagaaaatgacgaagaaagaacgcgaaaaaacaattgcaaatatagaaaaagaaatgaagcaagccgcaaaagatttagatttcgaaaaagccacagagcttagagatatgctatttgaattaaaagcagaagggtgacacaaatgaagcaaccatccattgtagttaaaggggcacgtgcccacaatttaaaaaatgtagatattgaaataccaaaagataaattaatagttatgacagggctttccggttcaggaaagtcatcacttgctttcgatacaatatatgcagaaggtcaacgcagatatgttgaatctctcagtgcctatgcacgacaatttttaggtcaaatggataaaccggatgtcgatacgattgaaggtttatcaccagcgatttcaattgatcaaaaaacaactagtaaaaacccaagatctactgtggcgacagtcacagaaatttatgattatattcgtttactatatgcgcgtatcggtaaacctttttgccctaaccatggtattgaaatagaatcacaaacagttcaacaaatggttgaccaagtgatgaaattagaagcacgttctaaaattcaaatcttagcacctgtggtttctcatagaaagggcgctcaagaaaaactgatagacgatataacaaaaaaaggttatgtacgtgtacgtgttgatggagaaatattagatgtcaatgaagtaccagccttagagaaaaataaaaatcatacaattgaggtagtagttgaccgtcttgttgtcaaagagggtatcgaaacgcgtttagctgactccattgagacggcgttacaattgtcagaaggaacgctcattgtcgatatcattgacggtgaagaattgaagttctcagaaaatcatgcttgtccgatttgtggtttttcaattggtgagttagagccacgtatgtttagttttaatagtccgtttggtgcttgccctacatgtgatggattaggtcagaaattaacggttgatttagagttagtcgtaccagatacgagtaaaaccttaaatgaaggtacaatcgttgcttgggaatcatcgagttcggatttttatcctacgatattaaaacgcgtgtgcgaagtgtttaaaattaacatggacaaaccatttaaaaaattaactgacagacaaaaagatattattttatacggatctaaaggtaaagaaatagacttcacatttacgcaacgtaacggccaatctcgtaaacgtacgatggcgtttgaaggtgttataaataatatcagtaggcgataccatgattctccttctgaattagtaagagaaatgatgagtaagtacatgactgagttaccttgtgaaacgtgtcatggtaaacgtttaagtcgcgaagctttatcagtttatgtagatgggaaaaatattggtgacgtcgttgagcgttcaattaaagacgcattagatgcctataatcatattgcgctttcagaacaagaccaaaaaattgccaatcaaatattgaaagaaattaattctagattagaatttttatataatgtaggactagaatacttaactttaaatcgtgcatctggctctttatctggtggcgaagcgcaacgtatccgtctagcaactcaaattggttctagactttctggcgtcttatatgtattagatgaaccatccataggtttacatcaaagagataacgatagattaattagcactttaaaagaaatgcgtgatttaggtaatacgttaatcgttgttgaacacgatgatgataccatgcgtgcagcagactatttagtggatgttggtcctggcgctggtgagcatggtggtgagattgttgcaagtggtacacctaaacaagttatgagcaacaaacactctttaaccggacaatatttaagcggcaaaaaacgcattgaagtgccagaagcaagaagagacattactgatcgcaaaattagtgttaaaggtgcgcgtagtaataatttaaaaggcattgatgtagatttcccattatcaacgatgactgttgtaacgggtgtttcaggttctggtaagagtactttagttaatgaagtgctttataaatctttagcgaaacaaatcaataaatctaaagtgaaaccaggtgaatatgatgaaattaatggtatagatcaattagaccgaattatagatattgatcaatcgcctattggacgtacgccaagatcaaatccagctacgtatactggggtttttgataatattagagatatatttgcacaaacaaatgaatctaaagtcagaggttataccaaaggtcgttttagttttaatgttaaaggcggtcgctgtgaagcatgtaaaggcgatggtatcattaaaattgaaatgcactttttaccagatgtctacgtaccgtgtgaagtttgtggtggcacgagatataatcgtgaaacgcttgaagtaacttataaagggaaaaatattgcagaaatcctagcgatgactgctgaagaagcgacggcatttttcgaaaatgttccgaaaattcatcgtaagttaaaaacgttagtagatgttggtttaggttatgttacattaggtcaacctgcgacaacattatctggtggtgaagcacagcgtgtgaaacttgcatcagaattacacaaacgttcaacaggacgctccatatatatactagacgaacctacaacaggtttacatgtggatgacatcagtagattactgaaagttttaaacaagttagttgagaatggtgacaccgtggttattattgaacataatttagatgtcattaaaatggcagaccatattattgatttaggtccagaaggtggcgacggtggaggtactgttgttgcaacaggtacacctgaacagattgcagaagtagaagcaagttatactggtaaatatttaaaaccagccttagaaagagacacggtaaaacaatagcaattgtaccgtatctattttccaacagcataacaaagctcttgcgacaccatgttacatgcgtgtgaagcaagagcttttttgtgattgttaacctttgataacatgtcgcaaacataaaatgttaagtttatcgttaattttaaaatgaatcagcttttaataagaaatatcgtatataatttatataaggcatatattaaaatatacttcgtctgcactttttaatatagattatcagttctttttgatatgatatgaacatagtacaaatgcagaagaaagaatgatagaggtgaacgcatgttaactacacagagtttagtagaacgctttaagcttgaagtaatcacaggtgaagcgggtttaaataaacaaattaaaaatactgatatatcaagaccgggtttagaaatggcaggttatttctctcattatgcctctgaccgtattcaattattaggaactactgagttatctttctataatttattgcctgatgaagaacggaaaggacgtatgagaaaattatgtcgtccagaaacaccagcgattatagtgacaagagatttagaacctccggaagaacttatagaagctgcgaaagaaaacgaaacgccattgatcacgtccacaattgccacaactcaattgatgagtcgtttgactacctttttagagcatgaactcgctagaacgacttcattgcatggtgtgcttgttgatgtttacggtgttggtgtgttaatcacaggcgattctggtataggtaaaagtgaaacagcgctggaattaatcaaacgcggtcacagacttgtagctgatgataatgttgaaatcagagaaattagtaaagatgaattaacaggtcgtgcacctaaattaattgaacatttgttagaaattagaggactaggcattataaatgttatgactttatttggtgccggttcaattctgactgagaagcgcctgcgtttaaatattcacttagaaaattggcataaagaaaaactatacgaccgtgtagggctaaacgaagaaaaattacgtattttagacacagaaataacgaaaaaaaccattccagtaagaccaggtcgtaacgtggcggtgattattgaagtagctgcgatgaactatagactgaatatcatgggtatcaatacagcagaagaatttaatgaccgtttaaatgcggaaattttgcgtaatggtaatcatagtgaggggaataatcaatgatgacgttaagctatatcgatccgattgcgtttgaattaggaccgatttcagtacgttggtatggcattattattgctatgggcatactgctaggttactttattgcacaagcaagcgtgaaacgtattggattccatcaagacacactcgtcgatattatattttggagtgccatatttggttttattgttgctagaatatatttcgttatttttcagtggccgtattatgtacaacatccaattgaaatcccaatgatttggcagggtggtattgccatacatggtggtcttattggtggattcgtaacgggtattattatttgtaaacaaaaaaatattaatccatttcaaattggtgatgtgattgcgccaagtatgattttaggacaaggtattggaagatggggaaactttatgaaccatgaagcgcatgggggcacagtttctaaatcttcccttgaaaacttacatattcctgactttataattaataatatgtatattgatggaaaatactatcaaccaacattcctttatgagtctatttgggatgtgttaggatttgttatcttaattctattaagaaaacacttacgtattggtgataccttctgtctctatttaatttggtattccattggcagattctttgtagaaggcatgcgtacggatagtttaatgcttgcaggtgatatccgaattgcccaattaatgtccattattttaatcataataggtgtcgtcataatgattgttagacgtgttaaatatgatgcgccacgttataaagctgttggtccattatcatggccaagtaaagaagtgaagtgatagtcatttatgcgtaatttaaagaaacaacaagttcaaggtaaaaatcctttatggcatatgtatcgttttgtcaaaggaatgaaaatgtttaaacaaacgttaattattgaagtttgccgttatttgcctaatgtgaaattaaaacattgggcatatcgtaaattattgaaaatggatatcggggctcatacagcattcgctttcaaagtagttcctgatttattgtatcctgaatacatcacgattggtaaaaattgtgtgattggctataattcaacgattttaacacatgaatttttagtagatgcatttactacaggccctgtgaaaattggggatcataccttgattggtgcaaatgtgaccatcctaccaggcgttaccattggtaatcatgttaagattggtgcgggttctattgtagccaaagatattccagatcatgcattagcgtatgggaatcccatacaaataataaaataaagaaacatttaggaggtgacgatggatggcgcataaagacaatgtaataccaatgaaattagatagtcaattttataaaaaattaggagatcaaaaatttcatcaacaagaatataaaaaagcggcatcttacttcgctaaagtgcttgaaatgtcacctcaggattttgaaacaaaagtaaaatattcggagtgcttagttagtttaggtataggtagcaaggctgaacatcttttttatgaaagtattgcacaaggtgaagaagttgaagaaagttattttcaattaagccagttaaatataacgatgaatgaagccaataaagcatttttatttggtattaactatgtaacaatatctggtgatgaggattataaagaagaacttgaagaaatgtttgaagtctcatatcatacacctgaaaaaatagagatagaaagtaaattatttgcgattcaacttattttccaatatttattttcacaaggccgcttaccagaggctcgaaattttattttaaatcaaagtactgacattcaagaacaccgcgtcgtacgtaatttattagcaatgtgttatttatatttaaacgaatacgaaactgctaaagaaatgtttgaacgtttattaagcgaggacaacacagatgtgcatgcattatgtcattatacattgttgctatacaacacgaatgatagtgaaaaatatcatcgctacttaaaaatattaaacaaagtaatgccgatgaatgaagatgagtcatttaaattaggtatcgtgctctgttatttaaaacaatatgaagcttcgcaaaagattctacaaccactctatagaagaggaaagttcctttcgattcaaatgtataatgcactcagctataatcattatcatttaggcaatcatgaagaaagtaaattcttttggacaaaattacaagaaatttctaaagttgatgttggccatgcaccttgggttattgaagagagcaaagcgtattttgaccaacaagtattgccgttattgttgaatgataatagccaccatagattatatggcatctttttattaaaccaattaaagggccgtgaagtactcttaacccaagaaatttggggtgtactagaatctatgaatgattatgagaagctctatttgacttatttaattcaagatttaaaattaaacaaattagattttattcacaaaggcatgttaatgctttatgatattgaggcattgaaaaataatgaagatttatttatagtatggattgatcaagcagaagcgatcatttcggaaaaagttgacctagcaaatgttagtgattatgttgctgcatttgtatatatgtattttcgtcattctgaaatcaaagttacaaagcaacaagttttagattggtttaaaatttcatcttaccgtttaaataagacgatagattatttagtgagcatataagtttataaaatgcaagaaatcatatatacttcgcatattgaattagtaaacaggaggcaattaaaatggctgaacaagtggattttgatattgcaattattggtgcaggcccagcaggtatgactgcagcagtttatgcatctcgcgcaaacttaagtactgtaatgatagaacgtggcatgcctggtggacaaatggcaaatacggaagaagttgaaaactttccaggatttgaaatggtaacaggtccggacttatctacaaaaatgtttgaacatgcgaaaaaatttggtgcacaatatcaatatggtgacattaaatcaatcgaagataaaggcgcatataaagaagtgaacctaggaaataaagtaatcactgcacatgcagttattatctcaacaggtgcagaatataaaaaaattggtgtgccaggtgaacaagaacttggtggccgtggtgtaagttattgtgcagtttgtgatggtgcattctttaaaggtaaaaaattatttgttattggtggcggtgattcagccgttgaggaaggcacattccttacaaaatttgcggatagcgtaaccattgtacaccgtagagatgaattacgtgcgcaaaaaatattacaagatcgcgcatttaaaaatgaaaaaattgattttatctggagccacacactaaaaacaattaacgacaaagatggtaaagtaggatcagtcacattagaatcaacaaaagatggttctgaacaaacattagatgcggatggtgtatttatttatattggtatgaaaccactgacagtacctttccaagatttaggtattacaaatgaagtcggttatgtcttaacgaatgaagatatgagtacaagcattcctggtatttacgcagcaggcgatgtacgtgaaaaaggtttacgtcaaatcgttactgcaacaggtgatggtagtattgcagcacaaagtgctatcgcatatattgaacacatcaaagatacaatagaagcataatcaatcgtgtgattgtgttgtataatagaatttagttaaagctagaacatgatgctcagacataactgaaagcattgtgctctagctttttacataaggatatatatttatctatgtttataattgaagtcttatggttataggagttaaattgcagccacagctaacttcaatattaaagtgataatgctactacctaagacctttttcatgtaaaatgaaatatgatagcataagattgttagacttatttgaagtgaaatgaatcacatcactttaaaatatgaactgttaacaacgaagtaacattttatgattaaataaatcaacgaatggtgtgaaaagatgcaaccggatgaaaaagaaatagtaaaaagtgaattattagtcgttacaggtttatcaggtgctgggaaatctgtagtcattcaaagtctagaagatatcggttatttctgtgtagacaacttaccaccgatacttttacctaaatttgtagaattgatggggcaaggtaatccatcattacaaaaagttgcaattgcaatcgatttaagagggaaagaattgtttaaatcattaatccacgaaatggatttaattaaaagtaactctgatgtgattgtggatatgatgttcttggaagcatctaatgagcgtttaatttctagatataaagaaacaagacgtgcgcatccgttaaatggaaatggacaacgttcattgatagaatcgataaatgaagaacgtgagttattaacagaaattaaaagtctagcgaactatacgattgatacgacgcaaatgaaaccaaaagaattgcgtaaacgcattggtgactatttcaataagagcaatgtacaaacatttaatattaatgtaacgagttttggatttaagcatggtattcaaatggatgcagacttagtattcgatgtgagatttttaccgaatccacactatgttgatgagttaagaccgctcacaggagaagatgaagcggtttataaatatgttatgaaatggaaagaaacaaatatattttatgaaaaattaatagatttattgaaatttatggtaccaggatataaaaaagaaggtaaatcacaactggttatcgcaatcggttgtactggtggtcaacaccgttcagtcgcattagccaaacgtatcggagcagaacttaacgaaagttttgattacaatgtgtatgtgcatcacagggatgcacatgtggaaagtggcgtgaaacataaagatgagaagaattaaacttgtactaataggtggcggtacaggcttatccgttttagctcgaggccttaaagattacccaatagatattacgacaattgtcacagttgccgatgatggtgggagcacaggaaaaataagaaatgaaatggatatacctgcaccgggagatataagaaatgtaatttctgcattaagtgaaactgagtcaacattagaacaacttttccaatatcgttttaaagaaaaccaagttgaaggtcattcgcttggcaatttactgattgccgcgttaacgaatattacggatgattttggacatgcagttaaagaattaagtaagattttaaatattagaggtcgtgttattccgtccactaatacaagtgtgcgtttaaatgcagtcatggaagacggagaaatcgtatatggcgagtctaagattccaaaaaaaaataaaaaaatcgaacgtgtatttttagaacctgaagatgtaaaaccgatggaagaagcagttgaagcgattgaagaggcagatttaattgttatggggccaggttctttatatacaagtgtcatttcaaatttatgcgtaaaaggtatcgcagatgcattacttaaagtagatgcccctaaattgtatgtttcaaatgtaatgacacagccaggtgaaacgaataattattctgctgtcgatcatgtcaatgctatccatgatcacatgggtgcgaaatgtattaactatgttatttgtagcacgcaaaattttcacggtaatgtattagaacgctatagagaagaaaatgcagaacctgtaaaatgcaacacgacagatatggaagcacagaatattaaagtctttacacatcctgatttagtagaagtgtcttcagaagattacgtgcgccataacactgaagtactttcaaaaatgatctatgaaatcgctatgagagaaacggcgacaattgagtttaatcgaaataaagatcataataaagatcataacgaataagccagacaataaacttataagaagggactgattgaatcatgagctttgcatcagatatgaaaaatgaacttactagaattgaagtagatgaagaaaatgcaaaagcagagctcagtgcgcttattcgaatgaatggtgcactcagtctatccaatcaacagtttgttattaacgttcaaaccgaaaatgcaacaacagcaagacggatttattcgttaataaaaaaagtgtttaatgtggaagtggaactactcgtacgcaagaaaatgaaattgaaaaaaaataatatctatatttgtcgtattaaggcaagagccagagaaatattagatgatttaggtattttaaaaaatggtgtctttacccatgaaatcgatgaaactatgattcatgatgatgaaatgcgtcgcagttatttgagaggtgcctttctagctggtggttctgttaacaatccagaaacgtcatcttatcatttagaggttttttcgttatatgaagatcattctgaaggtatcacacaattaatgaatgcgtatgaattaaatgcaaaacatctagaacgtaagaaaggcagcattgcttacttaaaagaagcagaaaaaatatccgattttttaagtttgataggtggttatcaagcacttttgaaatttgaagacgttcgtattgttcgagatatgagaaattctgtgaatcgattggttaattgtgagacagccaatttaaataaaactgtaagtgcagccatgaaacatgtagaaagtatacatttaattgataaagaaattggtttagacaaccttccagatagattgcgtgagatcgcaaaattaagaattgagcaccaagaagtttcattaaaagaattaggtgaaatgatgtcgacgggaaaaatatctaaatctggtgtgaatcatagattaagaaagttaaatgagatggctgataaattaagaggcggtgagcctatcgaactatagcacataagatgtatcatctgttttgcatggttatctcttaatttgaaaaagaattaagtgtaaattgaatttcttctagtcacacataaaataaatatgctaatataatgaaaagtatgaatttcaattaatgacgcctcatggaggtgtcttttttaatatttaagcattacttgatgaatattgaacattttatttataaaccacaataataaaatagtgaaaagtgagggtatttatgaaaaatttaataaacaagcattataaaaacattatattctgtttaattggtacattcataaatgcgattggtgtaaactgttttttacttggatcaaatctaggtgatggcggcacagtagggatatcattatctcttatgtatgcattcggtttatcgccagcgtggacctcatttattatcaataccgttgtcgtatttgtagggtggaaatttttaagtaaaacggtagcggtctacaccgttatttccaacactgcgttgtctctatttttacatttaactgaaaatattaatctaggtgtagataattttgttattaattctttatttgggggcgctgtgattggtatcggtgcagggctagtaatttctactggtagtacactgggtggtacatcagtcattgcgaaaattgtgaataaatactccgagatcaaaacgtcacaaggtatttttatactagatgcacttgttgttctttcattcttaatggtactaccattagaaaatgtgctgtttaccattattatgttatttgttacggaacgtgccacgtccttcgttatcgaaggtttcaatccgaaaaaagcagttacagtgatttcaagcaaaagtgatttaattagtgataaaatcaatgcgtttactggtagagggtcaaccatattaactggtaaaggtggttatggaaagtcagaaacacatatgttgtacgtcgttgtaccgcaatcacaagttacaagggtcaagaaactggtaaatgaagtggatgaaaatgcattcctagtgattcacgatgtgcgtgatgttttaggcagtacctttataaatatgaattaagaggcaaaataaaaacgatatttcggtttcaataccgaaatatcgtttctttaatgttaagtttaattaagtcccatcaacaataattaaagttgaattagggctttagaacttcactatttatctaattgatcaatagtgtattgcgcttgttcttccgtgaatccttcaatatctgatgttaattgattgtatattgcatcgtttgacatattctgtgtatcagcataatctttagctttttcgagagcattctttttataattcgcttttaaattatctactgtatattgtgcatctgattctttaaaaccatcagcttcagacattaattgattatagatgccatcttttgacatgtgcataacgttcgaataggttttcgctttgtttaatgcagatttttcttctctagaagcactactgttgtttgaattgtttgatgaattatcattagtgtctacgttgcctaggtttgcagtacatgctgagatgcctataatgataattactaacaaaattaaacaaccgcaaccagatccacaaccccaaaaccaacctttactaatttttttcgattttttgttgattttgatgcgcttggtattctctccactgcgcatcactaatttgcttgtctaccaatgtctcatttcccctttgtaaaataatctaatttttacaagtgtatcaaatgattgtaaatttaaaatgaattttgtattactaattatctttatgtttatatattactcaatgtaaaaagcgtgaattttgtgtatatattaagaattgatttttaagtatctcatttagataaggatgtatttttaataattaagataatttggtacttaatatcataatcagtgtagaaaattacatttctcagtgtaatccattttttattaatagaattttaaaaaatgaaaaaatcagatcgagaatcatttttgatgtctcggtctgattgattgtacaagtaggggatgacttaagtaggaatataaaatacatgagattgaactcgtgtgcgctttatattggttatcttccctttttaatttgaaaagtatacttttattacttattagtcccctcgaagggaatcgaacccctatcttaagaaccggaatcttacgtgttatccattacactacgagggggtaaagacgcattaatataagtgtacaaatcttaacgaaaacggtcaataagaataattcaactttcataaaatttttgagcgttattttttgaccatgtttgacttttaggttaaaataaatttatcagttagaaataaggaggcaatattaatgaatttaatacctacagtaattgaaacaacaaaccgtggggaacgtgcatatgacatttactcacgtttattaaaagaccgtattataatgttaggttctcaaatcgatgataatgtagcaaactctattgtttctcaattattattcttacaagcacaagatgcagaaaaagatatctatctttatatcaattcaccaggtggtagtgtaactgctggtttcgctatttacgatacaatccaacacatcaaaccagatgtacaaacaatttgtatcggtatggctgcatcaatggggtcattcctacttgcagcaggtgcaaaaggtaaacgttttgcattaccaaacgctgaagtaatgattcaccaaccattaggtggcgcgcaaggacaagcgactgaaattgaaattgctgctaatcatattcttaaaacacgtgctaaattaaaccaaattttagctgaacgtactggtcaatcaattgaaaaaattgagcaagatacagatcgtgataatttcttatcagctgaagaagctaaagactatggtcttgttgaccaagttatggtaccagaatcataagatttaatttcactaaaaaagccaagctacataatcagtagcttggcttttctatttatctcacattatgaattgttattaactttaagtctacgatagttgcgccaaattaatttaatggctacaaatgttacacagataccacttatcaccaatattgatgatataaatagcatagttaaattttgttcaaaagcacagataccattaattaataataacaatccagcgataaataataaggcatgtgttaaacgatctgtcttcatgattcatttcgcttcctattcacttaatgtactaaatcttcgagtgcgatttttaaatcaggatatttaaatttgaaatgggttgcttgtaatttattaggtattactttttgtgtatcgagcacaacagtcgacatttgacctaaagctaacctaatggctaacgatgggacccatgtatgatgagggcgatgagaaacgcgtgcaagtgtatacccaaacatgttttgatgttctacaatcggtgcagtaaagttaaatacacctcgtgcactttccgtattgatagtatggagcaaggctctcactaaatcatctatatgaatccaagaataccattgtcttcctgaacctaattttccaccaagataaaagtcataaggcaatttcatcattggtagtgcgccgccatcattagacaagaccattccaaaccgaccaataacgacacgcgtaccaagcgtttcaaattggcgagccattctttcccattgatatacgacttccgataaaaaatcaaaaggaagtgttttatataattcagtatacgtacgatataagtctggtttatagtaaccaacagcactcgcattgaataatacttctggtttatgtttacgattttgaaataattcgaataaagcttgtgtagcttgtatacgacttagcataatggtttgtttataggatttagtccatcgtttatttaaactagcacctgcaaggttaatgacgatatcgatatcaggtatttcattttcccaatttgattgagaccaattgacgtaggaaatcttagggtgtgatgaagtcatatcctgtctagttaaaatcgttatatgcgcatcactttgtatgatagctttaactaattgcgatcctatcatacctgtaccacctgtaattaaataatgtttcattttatcacctcataatttagtaatgcctaatgttggaatgattagagtgaatcaatcgaatcacatttgaaggtcataattttttcattgtttgttcaataatatgtcatttactcgtattaagaactatttaaaataaagagcattcattttataattgagataccttcgatattaattaatcatctcttaattatttcgagtataccccataatatactaacgaaggtaaaattttgactccctttagtagtggcctgtacgcattgcgtataggcctatatttatatgttaacgcaatttgctttgtgtaactatctttttacatttaagtcaaaacattttataaggatatgaaggtcgttatgccctataaagtaagtatagaaattattccagtggctatgaataacaaaataataatcatcataaataaggggaatcgctttttatctcggtcttttgattcgtaatgatcgttatcaatcataatttgacgtagacctcttttttgagatgatttttgctcctctaattcatcaaatggatcatgctttttcaattttagaacacatcctgttatattaatgttatagcttattcatattaataataaaaaattacaaaagtattgaaaacgaagattactatagattaatattaaactatagtattaaattttaagttatatatgtattttactatacatatgtcgttaagataacatctaggttaaaaaatagttaatgagtttaattaataaatgaaatagtgtaaaatatacatttgttattgaaagcatgcgcataaatgaaaacaaatgttatgatataaattgaagtgaggggagcatatgccaaaccataatccgaacaacaagaaaatgagtggttttgcgaaaattgtaagtggattaatcgtattattattagtaggtggattaatttttgctatttttgcatttgtagatcattcaaacaaagcgaatgaacgtttagcagatcagaaacaagaagaaaaagataagaaagaaaaacagaagacaaaagaagaaaaagacaaaaaagataaagagaaatctacacaagagtctcaacaaacacaacaaacgcagcaaacagttcaaacgcaacaacaaacacagcaaacgcaacagacgcagcaaacacaacagccagcaacgactgagcgtcgtacaacagaagaaaaatcacctgaaaaaacgaaagaagctaccacagaagaaagaacaactgaagaacgttctactgaagaaaaaacacgtgagccttcaacagaagaaaaaacaactgaagagaaaacatctgaaccttcaacggaagaaaaaacatctgaaccatcgactgaagagaaaaaaccagaaccatcaactcaacaaagaagttctcaaaataatacacaagaaagatcagcacaaagcaacaataatagttcaagtaccaatgaacgctcaagcgattcatcttcagaagatgactaatatatttaataggactgcgaaatcgatgttaatcatatgatttcaaggtcctatttttatagcgttaaaaacacctgttatacggtttgttttatagtatttaagcacacagactaaaataagaaatttaataagaaagtaatgagtgaggataatagtatgagtgtgatacaaccgctaagacaaccaaaaggtccacagccacatcctatgtttttagaatagtgaaatgtttgatttgaatgcgaataatctggttgtttaggatttttgaaataatcttcatctttataacgttgatcgtttggatcaatgacttctggatgatcgttctgtgacatgtattttcctcccaattgaataatctatacttttattttatagattaaagataatggaagcaatgattctacaagtgtatttaagccgctatcataagtggatgcttacttatttttaagaatcggaaaatataatgatttatgattagtaaatgattaatcgggtaatataacaatgcaagacattttagaggaacgatagaatatataaaggtaataagtaaaaattaagagaagtgtatttctcttgcaatttcaaatcgatagtagtattattgcaaatataagaggttatatttttttgtcctgctagggacgtaaaaagtcaacctatggttggaacttgaccctttataatgaaacggaggaggatagtagtgaatgatttgataaaagttcaacaaaaacttgtgccagaacttgttgaaaaaatgtatcgacgtttttcaattctcactactattgctaagcaccaacccgtaggtagacgtagtttaagtgaatatatggatttaactgaacgtgtattacgttccgaaacagacacattgaaacaacaagaactaatcaaggttaagccaacaggcatggaaatcactgaagaaggtaaagcaactgttcgtcagctaaatagttattttaatgttttttctgatgaccatcatctttcacagttgattaaggaacaatatgacattaaagacgtctatgtgataccaggtgattctgaaactgataaagcagtaaaaattgaactttcacgacaggcaggacagttggttgaagatgttctttatgatcatgccattgtagcagtcactggtgggtctacgatggcctacgtgagtgaggcaatgcataaacagccacatgatgttttctttgttccggcaagaggcggactgggtgaaaatgttgtatatcaagcaaataccattgcagcgagtatggcacaacaaacgaatggtgattatacgacattatatgtcccagataatgtgagtgaaacaacatacaatacacttatgttagagccttcagttattcacaccctagaaaaaattagagaatccaatattacaatccacggcattggtgatgcgctgaagatggcgcgaagacgtcaatcaccaaacgaagttatagaaaaacttcaacatcacaatgcctcgggagaagcatttggatattatttcgatgatcaaggcgatatcgtccataaagtgaaaacaattggactacaattagaagaccttgaatcgaaaaagtttatatttgctgtagctgggggtaaatctaaaggagaagcaattaaagcttacctttctattgctccaaaaaacactgtattaattacagacgaaggtgcagcaagtgcaatcgtaaataacagtaataaaaagtgattacactttttaaatatcatttttaaaggaggccattttaatggcagtaaaagtagcaattaatggttttggtagaattggtcgtttagcattcagaagaattcaaaacgttgacggaatcgacgtagtagcagtaaacgatttaacagatgacgaaatgttagctcatttattaaaatatgatactatgcaaggacgcttcacaggagaagttgaagtagaaaaagacggtttccgcgtaaacggacaagaagtaaaatcattctctgagcctgaaccaagtaaattaccttggaaagacttagacatcgatgttgtattagaatgtactggtttcttcgctgataaagaaaaagcagaagcacacatcaatgcaggtgctaaaaaagtattaatctctgctccagctacaggcgatttaaaaacaatcgtttataatacaaaccaccaagaattagacggttcagaaactgttgtttcaggtgcttcatgtactactaactcattagctcctgttgctaaagttttaaatgatgacttcggtttagtagaaggtttcatgactactatccacgcatacactggtgaccaaagcacacaagatgcaccacacagaaaaggcgacaaacgtcgtgcgcgtgcagctgctgaaaacatcatccctaactcaactggtgctgctaaagcaattggcttagtaattcctgaaattgatggtaaattagatggaggagcgcaacgtgttcctgttgcaactggttcattaactgaattaacagttgttttagaaaaaaatgtaagcattgaagatgtaaatgctgcaatgaaaaatgcttcaaacgaatcattcggttacacagaagacgaaatcgtatcttcagacgtaatcggtatgacttatggttcattatttgatgcaacacaaactcgtgtaatgactgttggcgaccgtcaattagttaaagtagcagcttggtacgataacgaaatgtcttacacttcacaattagtacgtacattagaacacttagcaactcaagctaaataatttgatgtaaaaatgaatttaacaactttaatgtgctgttaaatttaaacaataagcttaggagtaagcggggagcacaacgcttctccgcttattttaatttgttgttccatttagaggaggaagcttacatggctaaaaaaattgtaactgacttagaattaaaaggtaaaactgtacttgttcgcgcagattttaacgtgccgatgaaagatggagaaatcactgacgacaatcgtatcgttcaagctttaccaacaattaaatacatcattgaacaaggtggaaaagttgtattattttcacatctaggtaaagtgaaagaagaaagtgataaagcagcattaactttaaaacctgttgctaatgcattaacagaaaaattaggtgaagaagttacttttgtacctgaaacacgtggagaaacactagaacaatctgtcaaagatcttaatgaaggcgatgttttactagttgaaaatacacgttttgaagatgtagacggcaaaaaagaatctaaaaatgatcctgaattaggaaaatactgggcttcacttggcgatgtatttgtaaatgatgcatttggtacagcgcatcgtgagcacgcttcaaatgtgggtattgcatctaatttagaaacagttgcaggattcttaatggaaaaagaaattaaatatatcggtggcgtagttgaaaaccctgataaacctgtagttgcaattctaggtggtgccaaagtttctgacaaaattggcgttatcacaaacttattgaagattgctgacaaagtactgatcggtggcggcatgtcatatacgttctttaaagcacaaggtaaagaaattggtttatctttattagaaaaagataaagttgattttgcaaaagaattattagaccgtgcaggcgatcaaatcgtcttaccagttgattgtaaagttgcaaaagaattctcaaatgacgctgaaatcactgaggtttctgttgatgatatcccagcagaccaagaagctatggatattggaccaaaatcagttgaattatttaaagaacaattacaaggtgcgcatacggtagtatggaatggaccaatgggcgtatttgaattaagtaattttgctaaaggtacaatcggcgtttgtgaagcaatcgctgaattaaaagacgctaatacaattattggtggtggagattcagcagctgcagctatttcattaggttatggtgatgacttcagtcacatttctactggtggcggtgcatcattagaataccttgaaggtaaagaactaccaggtgtagtagcaatcgcaaacaaataagcgcacgactaaaaacagctatccatgattatcagtggcaacacatttaatcataaattactaataggagtgtaatataatgagaaaaccaattatcgcaggtaactggaagatgaataaaacagttaaagaagcaaaagattttatcaatgaattaccaacattacctgatacaaaagaagtagaatcagtaatttgtgcaccaacaattcaattagatgcattagttactttagtaaatgatggtaaagcacaaggcttacaaatcggtgctcaaaatgcttactttgaagataacggcgcattcactggtgaaacatctccagttgcattagcagacctaggcgttaaatatgtcgttatcggacattccgaacgtcgtgaaatcttccatgaaacagatgaagaaattaacaaaaaagcacacgctattttcaatcacggtatgacaccaatcgtttgtgtaggtgaaacagatgaagagcgtgaaagtggtaaagctaatgaagttgttggcaaccaagttaaaaaagctgtagagggtttatctgaagcacaattacaacaacttgtgattgcttacgaaccaatctgggcaatcggtactggtaaatcatcaactgctaaagatgcaaatgaaatgtgtgcattcgtaagacaaacagttgcagaattatcaagtcaaactgtagctgacgcaacacgtattcaatatggtggtagtgtgaaacctaacaacattaaagaatacatggcagaatcagacattgatggtgcacttgtaggtggcgcatcacttaaagtggatgattttgtacaattgttagaaggtgcaaaataatatggctaaacaaccaactgcattaattattttagatggttttgcaaacagagagagcgaacacggtaatgctgtgaaactagctaataaacctaactttgatcgttattacagtaagtatccaactactcaaatcgaagctagtggtttagatgttggacttccagaaggtcaaatgggtaattcagaagttgggcatatgaacattggcgctggacgtgtcgtttatcaaagcttaacgcgtatcaataaatctattgaagacggcgatttctttgaaaatgatgtattaaacaatgcaatcaatcatgttaagaaaaatgattcagtgctacatgtttttggtttattatcagatggtggcgtacacagccattacaaacaccttttcgcgttattagatttagctaaaaagcaaggtttagaaaaagtatatgttcatgcctttttagatggacgtgacgttgatcaaaaatcagcattaaaatatattgaagaaactgaagcgaagtttaaagaactaggtattggtcaattcgcatctgtatcaggtcgttattacgcaatggatcgtgacaaacgttgggacagagaagaaaaagcatacaatgctatccgcaattttggtggaacaacattcgaatctgctaaagcaggtgtcgaagcgaattacgataaagatttaacagatgaatttgttgaaccatttatcgtccaagaccaaaacgaaggtgtcaatgatggtgatgcagtcatcttttataacttccgtcctgacagagctggacaactttctgaaatatttactgataaagcattcgaaggctttaaagtagaacaaatcaacgacttattttatgcaacgtttactaaatataatgataacgtgaatgcagagattgtttttgaaaaagttgatttaacgaatacaatcggtgaagttgcacaagataacggacttaaacaattacgtattgctgaaacagaaaaattccctcacgtgacttatttcatgagtggtggtcgtaatgaagaatttgaaggtgaacgtcgccgtttaatcgattcacctaaagtcgcaacctatgaccttaaacctgaaatgagcgcatatgaagttaaagatgctttaattgaagaattaaataaaggtgacttagatttaattcttttaaactttgctaacccagacatggttggacacagtggtatgttagaaccaacaattaaagcaattgaagccgtggacgaatgtctaggcgaagttgttgataaaattactgaaatgggcggtcatgcaatcattactgccgatcacggtaattcagacatggtccttacagatgatgatcaaccaatgactacgcatacgacaaacccagttccagtcattgtgacaaaagatggcgttactttacgtgaaacgggtcgtcttggtgatttagcaccaacattattagatttattaaatgtagatcaaccagaagatatgactggtgaatcactcattaatcactaatcaaagtttaatcgctttgagcaagattgagaagctaacgatttcgaaaatgagatattttcattaaaatggttagttgcttataaacaacacaagagaattaaattactttgtatttatagtatttaaagctataatgaagatgaaatttaatatttctaaactacttatttataaaggagattataaacatgccaattattacagatgtttacgctcgcgaagtccttgactctcgtggtaacccaacagttgaagtagaagtattaacagaaagtggtgcattcggacgtgcattagtaccatcaggtgcttctactggtgaacatgaagcagtagaattacgtgacggagataaatcacgttacttaggtaaaggtgtaacgaaagcagttgacaacgttaacgaaattattgcaccagagcttattgaaggtgaattttcagtattagaacaagtttcaatcgataaaatgatgatccaattagacggtactgaaaacaaaggtaaattaggtgctaacgctattcttggtgtttctattgcagtagctcgtgcagcagctgatttattaggacaaccactttacaaatacctaggtggatttaatggtaaacaattaccagtaccaatgatgaacatcgttaacggcggttctcactctgatgctcctatcgcattccaagaatttatggtgttgccagtaggcgctgaatcattcaaagaatcattacgttggggagcagaaatcttccacaacttaaaatcaatccttaaaaatcgtggtttagaaacagcagtaggtgacgaaggtggtttcgctcctaaattcgaaggtactgaagatgctgttgaaacaatcttagaagctattaaagccgttggtttagagccaggtaaagatgtattcttaggcttcgactgtgcttcttctgaattctttgaagatggtgtatacaactacgctaaattcgaaggtgaaaatggtgcgaaacgttcagctgaagaacaagttgattaccttgaagaattagttaacaaatacccaattatcactatcgaagacggtatggacgaaaatgactgggatggttggaaagtattaactgatcgtatcggtgataaagtacaattagttggtgacgatttattcgttacaaacacagttaaattatctgaaggtattgaaaaaggtatcggtaactcaatcttaatcaaagttaaccaaatcggtacattaactgaaacatttgacgctatcgaaatggctcaaaaagctggctacacagcagttgtatctcaccgttctggtgaaacagaagatactacaatttctgacattgcagttgctacaaatgcaggtcaaattaaaacaggttcattatcaagaactgaccgtattgcgaaatacaaccaattattacgcattgaagatgaattatacgaaacaggtaagttcgacggacttaaatctttctataacttatctaaataatacagcataaaaatttaagagttcacgcgctaaacgcagattattgaggatctgtgttaaactgccaacaaagtctccgattttgttggcagtttttttgtgctcgttttttgtactcgcttttcgtggatacagatacggcccgaagtcttcgtatagtgttttcatgctcgagtcgatccaaattactgcctaataagttaataaataaattaaaaagtaatgatttttatcgcttattctgtggtacttagacttttatatttgaagtatcatattgctgttctaataggcaatccatagagccactgactacagtccgacttgctcattttaaaaagtataaatttattgagacaaatacataaatcatatgaagcgaatgaacttggcgtgttactttataatgatgattaacttaaattgttcatcttttacaattaaactgatataattaaagatgtaaaataaagaaggagtcttaacgaattatggaagtaaaacctaagtctaaagaaattaaaacggctcatctgattgcatatagttcagtcatcattgcgattctttatgttatacatttattcgtagttttagatgatagtgttattaaacaactattatcaaatagcggacagacaacatctgaaaatgctgtgggtacaattaaaaacagtttccaatttacaggaataatgtatatttttgcgaatttagcaggtatcttcgcaatttggaacagacatatctatttatggtggtttatgtttgcggtattcgtatcacaaatattgtataatttaattaacattagtgcagtttatggcgcgatattagatatcaaatctagcgtgaatatcattcctttaacactggtactcgttttatcatttgtgttagctgtttatatgttaattgtttcgattaaacgtaaaagcacgttcaatagatagaagtttgctaaagacgacaaacgtatgatataatgcgtttcgtatataatgaatggaggacaattttcatgcatacattaataatggtacttttgattttagattgtattgcattagtaactgttgtattactccaagaaggtaaaagtaatggactttcaggcgcaattagtggtggcgccgagcagttatttggtaaacaaaagcaacgcggtattgatttattcttgcatagattaacaattgtattgtctgtcattttcttcttgttaatgttaggcataagttattttggtttataaggtccgacaatgttaaagtcgggcttttttatttataatagttaatatagcttttaaaaataattgagataaataaaaggtgaatttaaataaacgacacgtactaaagcataagcgaaaggattgaaacacaatgcagattaaacttccagaaccattcttctttgaagaaggtaatagagctgtgttactgttacatggctttacagggaattcctcagatgtgagacaattagggcgttacttgcagaagaaaggctacacatcgtatgcaccacaatatgaaggacatgcagcaccacctgaagaaatattaagttcaagtccatttgtatggtttaaagatgcactagatggctatgatttcttagtagacaaaggttatgatgaaatcgttgttgcaggattgtcacttggtggatgttatgcgttgaaattaagcttaaacagagatgtaaagggtattataacaatgtgttcacctatgtacattaagacggaagggtctatgtttaacggtgttctagaatatgcgcgtaattttaaaaagtatgaaggtaaagatgaagctaccattgaaaaagaaatggcaaactttaaacctacagacactttaaaagagttacaaggacaaatacaggatgtcagaaatcacatagatgaagtaatggatccattattagttgtccaagcagaacaagatcaaatgattaatacagattctgcaaatgttatatacaatgagagcgaatctgatgaaaaagatatcaaatggtatgcgaattcaggacatgtcatttacattgataaagaaaaagaattagtattcgaagacgtatacnatttcttagaatcattagattggtcgaattaaaaatttagaagtatttaaaaatagaaaggaggggcataatgaatttaaagcaatccattgaagaaataattaaacaaccagattatgaacccatgtctgtgtctgattttcaagatgcattaggtttaaatagtgccgactcatttagagatttaatcaaggtgcttgttgaattagaacaaacaggtttgattcaacgtacaaaaacagatagatatcaacgtaaagcatctaacaatgccaaacaatccaaattaatcaaaggtaagttaagtcaaaataaaaaaggttttgctttcttacgtcctgaagaagaggatatggatgacattttcatcccaccaacgaaaatcaatagagccatggatggtgatactgtccttgtggaagtacatcaatctaaaggtgaacacaaagggaaattagaaggtgaagttaagacgattgaaacacattcagtcacacaagtcgttggtacttatagtgaagcacgtcacttcggctttgtgttaccagatgataaacgtattatgcaagacatctttattcctaaaggtcaaaatttaggtgcagtagatggacataaagtactcgtacaaattacgaaatacgcagatggtacagataatcctgaaggtatcgtatcggcaattttaggccataagaatgacccaggtgtagatattctatctatcatctatcaacatggtatcgaaattgaattccctgacaatgtgctcgcagaagctgaagcagtaccagatcatatcgagccatcacaaattgaaggtcgtcgcgatttgcgcgatgaactaacgattaccattgatggtgcagatgctaaagacttagatgacgcgattagtgttaaaaagttaagcaatggtcatacacaactaacagtcagcatagctgatgtaagttactatgtaactgaagattcagcgcttgataaagaagcatacagtcgtgcaacaagtgtctacttagtagaccgagtgataccgatgattccacaccgtctaagtaatggtatatgttcattaaatccacaagtggaccgacttacattaagttgccaaatggaaatagatgaacgtggcgatgttgtagaccatgaaatctttgatagtgtgatacattctaattatcgtatgacttatgatgaagtaaatgaaattattacagatcaagatacggaaacacgtaatcaatatagtgaagtcacaccgatgttagatttagctcaagatttatctcagcgcttaatccatatgagaagacgtcgtggtgaaatcgattttgatattaatgaggctaaagtacttgttaatgaagagggtatcccaacggatgtagaaatgagacaacgtggtgaaggcgaacgcttaattgaatcatttatgttagcggctaatgaaactatcgcggaacattttgatcgtttagaagtaccatttatctatcgtgtccatgaacaacctaaatcagagcgcttacgtcaattctttgatttcgtgactaattttggattaatgatcaaaggtacaggtgaagatattcacccgtctactttacaaaaaattcaacaagaagttgaaggtcaaccagaacaaatggtgatttcaacaatgatgttacgttcaatgcaacaagcacgttatgatgatgtgaacttaggacactttggcttatcagctgaatactatacacatttcacgtcacctatacgtagatatcccgatttaattgttcatagattaattcgcaaatatattattgaacaatccatggatagaaaagaaaaaaataaatgggaagcattgttacctgaaattgctgaacatacgtctcaaagagaacgtagagcaatcgaagcagaacgtgatacagatgaattgaaaaaagcagaatacatggtgcaacatattggcgaagaattcgaagggattattagttcagttgcgaatttcggtatgtttattgaattaccaaacactattgaaggtatggtgcatgtatctaatatgacggatgattattaccattttgatgaacgtcaaatggcaatgataggtgaacgccaagcgaaagtattccgcatcggtgaccctgtccaaattaaagtcattaacgtagatgttgatgaacgtatgattgatttccaaatcgtcggtatgccaataccaaatagagatcgcggtcaaagaccatcacgtggtaagaccatccaagccaaaccacgtggcaattcatcggataaatataaagatgataaaaatggtaaaggcggacgtggacgtactaaacagaaacaacgtaaaggtaaaaacaaacgtcaaagcgaccaaagtaaaggcaacacaaagcataaaccattttataaagataaaaatgtaaaaaataaagcacgtaagaagaaaaaataactcaacgaagaggtgaaactcaatgccaaagaaaaaatcaccaggaacactagcagaaaatcgtaaagccagacatgattataatatagaagatacgattgaagcgggcattgtgttacaaggaacagaaatcaagtcaattcgtcgtggtagtgcaaaccttaaagatagttatgcgcaagtgaatcgtggcgagatgtttctaaacaatatgcacattgcgccatatgaagaaggtaacagattcaaccatgatccacgacgttcacgtaagctcttactacacaaacgtgaaatagcgaagttaggtgagcgtacacgtgaagttggctactctatcgtacctttgaaactctatctcaaacatgggcactgtaaggtcttacttggcgttgcacgtggtaagaaaaaatacgacaaacgtcaagcattaaaagaaaaagcagtacaacgtgatgtagctagagagatgaaagcccgttattaagcggatatattgccaaagatatgaatctttggtaatataatatgtgctttctgaaaaagcgctgtaacagatacagcctaccagaaagtacatttaatattattcagggggcgtttttggattcgacaggggttccatgagctagttaagcgtgtcggagggctgtctccgtcactaacacacacagttataataactggcaaagaaaacaataatttcgcagtagctgcgtaatagcactctgcatcgcctaacagcatctcctatgtgctgttaacgcgattcaacctttagtaggatacgctaggcactgccgtttgaagtctgcctagaagagatgaatcaaactagcataatgacggatgtctatcacctcccattatgcgaaactcattgatagactacgcacgtagaagtgctagtatcagaacctctggacgcgggttcgaatcccgccgtctccactatatagtctgcaacccttgtggttgtaggctttttatttttgttgcatagaaagtgcacagataatacacaacaaataaaaaacaccctaaaataaggggtgctagttttgcatatcatttattgaaaatgtttaattgtttttttgatattgcttattactattactacattaattattaaaatagttatagaaaaagatattgaaaaagttattaaggagtttgaaccaaagtctagtaagtaatttaataaaaaaattaaaaatattataattaaacttaaaatggtaatgaaaagtaaagctgttattaatagtgataaagctagtttttgattttttaacttaaaaaggttcattaaatcaaatttacttgtattgtttttggaataatattcaagttcaattccatctaaatcattgatatttattaaaacacgattatagcttttgggagaatcataagaacatatatatttgtctttataccgttgtaatatatagagatttctattagtattaaaataattattaacaaaataattagatttgcttttcaaatcacccattgtcaagcttatatatattattaaaataattagaattattgaagtaacaactgtaacataggtatagcgatcttttggattagctattatttttgttgggttaatattataatggtcagctaattcaagtgaaattaacaaaattaaaatagtgctaatgaaaaggactactaataaattgataatttttccaacagcaaataactgattaatttcagtgacttttaagtaacgatctcttgatatagcaattatagtaaagactatgccaattactattgaagctgtcactttaccgtgatagtccgttttgtttatatggatataatcatcgtcaaagtttatatcttcccatgtgagtgctctaatctcgcccttacgtgcgccactataaaataacaatttgaagaacagtttttgttgtattgtaggtaatataccatagaattgattaaattgctctaacgtccaataatttaaacgtttttgtatttcaatttcaaagttgcctactaacaatgcaacattacgacctagatcatgatactttatagttatatcaaaactttgtagtagaagttaaagaatcgctaaataatgagcgtgaggagttggtcgtgtgatcaaaagtttaagtaaagaagattatccaattttagaatgatacatgcgcaactatcatagtatggttgatacttataagcataagcctagcgacatggatgaattacaatatatgaacctataatcaattgtgaaaggcattacaaaggtgtataacgaaagtgaagttaaaatacagcaggttataaagctcacatggtgggatgataagaagtatacagatgaagtgattgccgatgtaataggtgttagtgagttaacattaagacatgttagagaggtaatattaaagcgtgttgcaaaggcagtagaatatatatgaagtatgataaagctactgttaaagaatttatattaaactaccacaagacaatagagaataacgatatacgtgatgaagatgttggtatagatgacttctttaatgtgagtgattagccagtaaataatgtaatagataataacaattttgaagacgcgatatttttcaatgaattagaaactatagtagaaagagtagggacggataaagagttttgtttgttcctactactttgtaaaggcgttagttatgaaaagataggaagtatatttgatgtgcaggcacaacgagttaggcagatgtttaatgcgttgttggataagttggaatgaaaaaagggctattttaaagccctttttaagttactatctttcattaattatgaagtaaatgaatatagtgattattattagcataatcaaagtaccaataaatggtacagagcttaaagataatgttgcaatgataaaaccaatagaaattaatatttgaaaaatcgccgtaagtgaaaaatcgccctttaatatcaaatatgagaaaaaaatagtggcacatagtaatactaaagtaataaaaataagacctaagatgcttaaagttccactaagataaccgtcaacaaataaatttttaatttttacttttgcaccatattgagaaacaaatgaatcagcagtagatttcaaagtaaaaaataaaaagactgaaataatcagtgtaataaagttccaagcactttttttaatatcttctaaaatttcatccaagtaaatccctccaaatatttttataaataatttgtcataatattctaaaaataaaatgttataattcctaaatgttgtatttttattcttaaatgtaatgtttatttattaaaaaaacgattgggatattaaaatgcacaaatatatgtttgtttaaaatccaatcaaaaaaagaatttttgcagcaattcctagatttattattttatgtagtattatagaggggaagtaaaaattaatataaaatcattagagcacaggcacttatgtgctcgccctattttttttatggtataatgtatttacatgtgaatcgctagccttttctcaaatatctttttatatccaccacccacacatgtcactgggtggttatttgatgattttatacgtaggtagtacgaaatgttaaaaaatctacaaaaatatcaaattaaatgttatgattaaattcctactactgtcttctaaaaattaaaaaggagacttaatatgataaatattatttcagcaattggatcactaggaacttttattatggcgttattttattttgtatcggtatcagttcaactttatcaaatgaaaattagttttataccagctctagggtttaatcaaatccttttagaaaaagatgaaaataaaaatttgaatttaagaaatacgacttcaaattctgaagaacacgaagattatttaaagttatataaccttggtggaggagctgctaaacacataactgttgaagttatcttaggtaaagataatgtaattcaaaagaaatatataaatatgttacctagcaaagaaagctatatgttacctattaataaaactgtatttgatgaattggatgatactattcaaaataatggttacgaatcagatatgaatattaggctaacatattatcacaatgtgagtagaaagaaacaagaagtagtattaaaaggtcatattgatagttttaattcttatgaatataaagagatatatgaactacaatttatataacttttatagctataatttgtttccaataagaaaattggggtatttaactatcaagcgacgtggaacgcttaacaaactgtaataaattagcctatctgattagataggctgttttttatttatttaaaaactcattgagtagtggattattattttctttttcaacaaccactgatagatcttcggttacatcttcttttatatctattactttttcttcgattaaactttcaactcgattagctacttcttttgtattccaacctattttttcaatttcttttttgtaatccatatgtattctccttgattgtctgaatttatctaacgattaattataatttattataagaaaaatagatattaaattgatttatatgaacaagcgttctattatattcatgaggtgattatatgattccaaatttagattggaataaaaactttcaagaatttcaagaaatattaaattctggtattaatccagagtggttgtacaatgccaaagcgaatatgattttaaatcctgcatacacaggagaaggtaaacaatttttcttcacaaaagatattataaaagctagtaaaacgattccgtttttttgaggtgataatatgaaaccaataaatccagatgtatctcatgactataaatatacaagtgactatagagaaatccctatagagtaccttaatccacgtatgccaaaagggcgtgtaatctttaagtggcaagcgtttaagacaatgcccgaacaatatgagcaactagaacaatacatacaaaaccaaagtatgattgaaaaactgatattagacgacgatcaattgaatgaacttaataacacattgattttcaaaatgtgtaaacacacaactattgaattgcgttacttcgataataaatatattaaaactaaagttagttacatataaaaagtaaatgtttatacaaaaacactacacatgtatgtagatactggaatgagtgtattgaatttaaaagacatattggagataaaataaacacacctaaattaataaatctattcttatcgctgattttatttgatagttattgttatatacatttatgttagaatattctgtgaattgaaaatatttttaagaaaatgaggtgtgatatataagttttataattgaactaaccaaagatactaaacttctagctgatttaaataaagaagttcaagatttacattttcaagagtacccaaaaatatttaagccatataataaagaagatatcgaaagtttctttgattttattattaataatactgaaatggtcgcagagttactattaaataatggaaaagaagtaggttatattatttatcaaataaaaacagtgtctgaaaatccatttaaatatgggtataaatctttatttgttgaccaaatttgtataagaaacaatttacaaagaaaaggatttggtaaattgactatggaatatttggataatgtggcatataaaaatgattgtgattttatcgaattagattattgggcaaataatatcaaagcagaaaagttttatgaaaagttagggtatataaacatacaaaattatatgatgaaacatatatagtattttttaattttaattaagggttaggagaatatatgattcaatctataaatcacgtaacttattcagtatcagatattaaggcatctattactttctataaagatattttaaaagctaatattttagtagagagtgataaaacagcgtattttactgtaggtggtctatggttagcgctaaatgaagaaaaagatataccaagaaatgaaattgcatactcatatacacatatggcttttacaattgatgaaagtgaatttgatgaatggtatcaatggtacaaagataacaacgtgaatatattagaagggcgtaatagagacgtaagagataaaaattcaatatatttcactgatccggacgtccataaattagaattacgtactggtactttgcaagataggttagattattataaagaagaaaagccacatatgaatttttataaataagtaggttatattatgactataaaaacaagattattttaagaacaagatttaaataagataaatgaattattagttttatatgaagaattaggttatccgacaaaagcagaagatttatttaatcgtttgaaaaagatatataatcatggagattattacttgttacttttattaaaagatgatgcgataatcgagttgagtggtatgtgcaaaatgttgttctatgaaaagaatggagaatacatgcgcttactagcgtttgttataaacactgattatagagggaaaggctatggaacacttttgaacacttttattaaacgagtcagaaatgttagcaactcaattaggatgcaaagcaatcactttaaatagtggtaacagaaccgaaagagataacgcacataaattttataaaaggaatggatttgaaaacaaatcatctggtttcgcaaaaagtattgataatataaaataaagccaactaaatgagtagctagtttattttatattaaatttattctgagaattcaatgtcatcatatttattatagacttcatcagcattatctccgtcataataaccttgttcaatcgctgtttttttatttgaaatatataaaatatagcataatgaatttaataaaagctttagggtagtatgaatagtattattcctgaccgtgaatatgagttcgaaattttaacctttgaatataaaatcttaggaggtcttaatatgtttgtgacgatatctttaatatttattatagtaggaatattacaatttttaattatactattagatatatttaaaaatccacaacgtcaaatgatgattatgaatattgtgtggccattaaccggcttgtactttccgattttaggattaatcgcttattatcgtttaggcagagaaaaagaagttgatcacatgtcacaccagcatgatcatcaccatgacacgatgcatcatcatgaacatcatagtaataagccattttggaaaagtgtcgttgtttctacaacacactgtagtgctggttgctcattgggggacttaattggtgcgcctgttgttttctttacggggttattgttttttaataatcaaatggtgacagagtttattatcgaatttatattagcctatatcttcggtttaatgttccaatacttccacatggaaattaaacatgaccatccaggtagagatttagtagacgcaatcaaagccgatacgctatcgttaattgcttttgaaattggtatgtttggttttatgattattatgcatctctttgttagtccaacttacatgcagcctaatcatgttgaatattggttcttaatgcgaattgcgatgttaatcggatttatgacaagttatccaatcaattggtatttagttaaaaagggtataaaacatgcaatgtaaattttatcttattaaaaatttaagtgtagttgcaaaaaaagaaatgagaagttaacgcaaagaaatgaagctgttaaatatgaaaggcagaaaatattttatcttattcatgttttaagtatgactcattatttatcgatatcaacagggggttcgtatactatgacaacatatggagataaagggtttttaaggctacgggagctaatatttattttgaatcgaaggtcatggtgaaaatatattattactgcatgctggaattgcagattcgcgcatgtgggataaagaattccatttactatcagaaaaatatcgagtagttagatttgatcttcctggctttggctttagtgattttacagaaggaaattatgcttatagtaacattattaatgaactactgacacatttggacatcaaggatactcatattttagctgcttcatttggtggaaaattagctattgatttttatttagaaaatccggaaaagtgtctgagcttagcactattgtcaccagctttaggtggatggaaaggttcatcttttctccaaaaatatgaggaagatgaagaacgattattgcaagaaggaaaaattgaagaaacagcaaagttaaactataaaacttggatactaagaaatagggatgcagaacttatcaacgtagatgtaaaacaattagtggttgatatgcaaatgaaatttttaattaaacctgaagcaaaaaattcatgtgaggaaataaaaaacgaagatcatattttacagttaaaaaatatacgaattcctgtattaattattaatggtgagtatgatgttgaagattttcatgatatttcggaggtaatgattaaagaaatatcatatgtaaaaaagaatacaatgcctaatacagcacctttagctaacttagaatcgccaaagcaatttttaaatttaatttcagacttctttttagataatgctaattaattttgaaaatagcatttaatatgattttgcttatatacttattcaaaatcacctaagtatttactttaatattgaatgaaaagcgaaaaaggatatattaataacattttgaaccactatattattaaggcgacaatagataaacaaagatattcaatctacaacagtttaaaaaagagagagttcctccaattataatggacgactctctttttatattttgaacttaatgaaatttgatttggttttgtgtcccttttgcttatggtcattagtatggttttataacacaactatctctagtataaatatatattttaatccgaatagaactttccgctatctagatctctgcttttcgttcatcaacattagtagatagtaactttaaataacgttctacattgttagatggcgtgtcttttggaaatgaatgtgtaaatatatgacctttaattgtttcaactgtgtatcttatgtcgatagcgccaatttcatagttaataattttcatagagatccccttaaaattgcattttgtaaaattgaagctagtgctatgaaactacaatgatacaatatttgtgttagtcatcattaactatatgacatatagaaatgataagatttattcaattgtactatacataaacttattcgcaactaaaaagtgggcaatatttagttttatctattttagcgtgtcctttgtagtatattgattcaaaaatatcgacaaagataatcactttgccgatatacgatagctacaaatagatgtggacacaatattattttttaatttgtctataaaatcattaactttatcttttgcattttcagttacttcttttgctttgccagaagctttatcttctttaccttcttgttctaaatctttgttatccataacattgcctgctgtctcttttacgttacctttaacttgttcaaatttactttcatctgccatgttattcacctcaaaaatatatttttaaaaattcttatacttataatatacaaaataataaaatttaacgcaattaaaatccattttgaagtaagccgaacgatattttaaaagtaaaaaacacattcatgtagaatgtgtttactcatcaagtagttgcagaatttcgttatacttttgttcacttaacgtacctaatggactttgttcaatttcaaatattagaaaatcatcggtagaagtaaagtaagttttgatgttttcacaaattgtagttttgtctaaatcactttttaaaagccataagcctctgtatataaataaagcacttcctaaattatttaattgagacggtaatttttcgtaaccgtatgaaatggaatttaaattataagacaatatatattttgacatctatatcacgctcctatttaatcatatcattaaccgatattaaaaagttgggagaactatgatatttaaacgatttccattgcaagagcgattcattaaagaattaatcttcaacagtcattaactttttcagtaaatgaaagtcagtggtgtgtgttagatcaatgaaatattgcgtttgccatttttgagctttttgagctgatgggtttaaattgacctcccaaggtgggtaaacgcgcattgccattttccctttattattttccgaatacagtaagcgttgtgcaagtaattcagatttggggatgataaagagacctttgtgcgtatgatcaagcaccgtaatgattaagatatctttagcttcttgatatgtaaatggcctattgttgttatcgtggtctttagtccagaaaacaacaaagtaaccagattttgttggtgtttttttagctaatctgtgtctatatctacaatgattaatttgaaaacaatagctttcgtattctgcattataggtttcgtatgttaagtgatctaaagcacttatatttaatgaattaaataatgtacgcattaatgtgattgatttatacatggttatcctttgaaatatgtattttgtataaataagtatagcattcaactagatgatatataagtaaatgctatatatgtttaacgtatgaattatttgaaaatagggttataattaacgtatgaataatttcaataaaatggagtgattaatatgaattatattaaatatgtgaagtctaaagataatacgaaactctatatgaaagtgaatgatgttcaagaagcaaaagcaaatattattatcgtgcatggggtagcagaacatttagatcgctatgatgagattacaggctatttaaatgacaatggttttaatgtcataagatatgatcaaagaggacacgggcgttcagaaggaaaacaaacattttacagcaatagtgatgaaattgttgaagatttagaagcggtcacaaatgatgttaagacacatatggacggtaaagtatatctaattggacatagtatgggcggttataccgttgcgttatatggaacacagcatccaaataaagtagatggcgtgataacttcaggtgcgttaacacgttataataatgaactttttggtaatcctgataaaaacttctcaccggacacatatttagaaaatagtttaggtgaaggggtatgttcagaaaaagaagtaatggaaaaatatgaacttgatgacttaaatgcgaagcaaatttcaatggggcttatcttttcattaatggatggtattgaatacctaaaagcgcatgctcaaaattttacagataatgtattaattttacatggaaaagaagatggtttagtaagttatcaagattctatacaattttttcaagaaataggttcagtacataagtcattacatatctacgattgcttacaacatgaaatatttaatgaaaaatctcaaaataaatttatttttgaagaaatcgttgaatggcttgaaaatgaattaaataaaaattaaaaaagtaaggttacaacaattgaattaaataaaactgatgtgattttgtttgatttgttttagaaaaatgaagaatttataataaataaaatagaggagtgattaatatggaaataaaaacattgcatatggaatatgaagaaagttttagtgattttgataaacgtgtcaatgaatttttacaatacgtcaatgataagcaacactgggaattagtaagtgtgacaccatctgtcacggacagtgttgaaggtatagactatatcataacagttatctttaaaaattaagcataataaaaagtggggaacggacatgcgtttcccacttaaatatacaaataattaagttcccttaaaattaattcatgaattctttttcagaaacattaaagtaatcagctaaaattgatgcgtttttatttgaaacattgcgatagccattttcccagtcccaaatttggcaaattctaatatctgtattgtagttcgcgtttaaattaattgctagttttgaaatacttaaattagatttttcgcgcaattccataagatttttcataacaagtcactcctaaaagaaatagataatcaacatccatgtgccattgtagtatatatatttctgtaatacaaacttatattttattgaaaataccaccatatcatataatatttttttaattttattgtgtatataaacaaaaagttattattttagatgtaaaccatatatttgatataagaatgatttcatagataaggagaatataaatgagaattatagcgacaagcatttttgtagatgatcaagacaaggcgcaacaattttatactgaaaaactagggtttaagacaaaacataatattgaaattggcggtggttttagatgggtaacggttacagaaaaaattcgactaataccgttgaaatcgtattagaacccaatgtcattcctatagctaaagactatcaagaaggactatatgcggcagggattcctgtcacaatgttcggcgtggataacttggatggtgaacatcaagcattgattgataaaggtattacatttcacactgaaccaaaagaagttgaaggcataaggtatgctatttttgatgatacatgtggtaatttgattcaaatcgttgagcaataaatataaataagtgatacattactgctataaataattactaaggttatggtttgtgtacgtgtgcttttgggaggtgaataatggaattaaatataaaacatacgagagatgtaactagtcaagagcttatacaaatttatcaagctcgaattcgcgtgtttgtcgtagaacaaaaatgtatatatcaagaggttgatgattatgatctagatgcaattcatgtcatattgagcaatgggaatgacattgtggcttatacaagaattataacgtttgaacagtatataagttttggaagagttttggtttccgaaaattatagaaatcaaggctatggacgcaaaataatcaatgagacaatcaataaaataaatgaaatgtatcaaaacacgacaataaaaatttcagggcaagcacatttaaagccattttatgaatcatttggttttcacagtgtttcggatacatatatggaagatggtataccacatattgtgtttgaaatgcgtacacaaatttaaatataatatgggtagcgatgtaatcgtcgttatatttaaaaatccactttgaatttttattataatcatataatctacaaaacaaaacgccaactaagaaaagtcattttctagttggcgctaataattaattggattaaatagacgcagtgttctatattgaattaaaattgaagccccttgattttgaggttggtgacaacattgaaatgttaattgttttgcgattattttttcattttgtcaacatcttgcgaaacgagtaatagtagttcctcggtttctgaatctgttaaatcatcagatcctttgattctaataactaagcctttatctgttttgacatgataaacaggttcgccatccttataaactttacgtaatacttccattccatcacccttttttataaaaacatttcaatgtaaatatccataacttatcgaaatgtatgatatctaatactaaattcaactagataattaatctgtttttttattaatgctttatctataggataactttttattaaattgttttccaacagtatgattaattttattaaaattaatttattatcaactgccattattaagtattgaaagttaaatgttttcaaagtagcaaaaaaaaaattgtagttattttgatattattagttatttgtgtttttatttaataaaagtgggtatatataactaagcacaagaagtcctccaaactctagtgccgattatattttcgaggttgacgccacttttcgaagtggcgtgttttaattttaaaaagggatgtaacatatgaaattattaaatatattttcgcttatttgcagtatattcatcggtatgattattatttatggtgtcgttatgatggtcggagatgctttaggtatcacaacatttaataatcaattattaatagtaggtttgtctctggtcttacttagtggattgttagggaaaagtaaaccaagattatcaacgtttgtattatttataggatttattattgtcataataaattaataaaaaactaagcaacaacactaaaataactttaaaaagtatattttagcattgctgctttatatcattatcgaagtcattcaacattttgtctaagcttatcgtccatttctttagatacgctttgtaataggttatttgtttgatattcggataagctggcatctgtttttactttaatgataaggcctaaatctgtctgtatatgataaataatgaagttattttcgtttatttttcttaaagttttcatatcatcacctcagggtaaaatttgcgaggtcacataagtgtaaaaagtaaatatatgattattttaaatcattagcgtataaaaagaaataaattgaattatcaaatgagaacagtggcgtggatcactacttcgatattgttatggcgtcgatataaacaagttctcattaaaaagacaaggcatcaacggatgtcttgtcttttggtttgtatatactaagtgaaaatgtattaaaactgactcgtttttctatcttcatcaacgacatcttcttctaattcgtcatcaatgacaaggtttaataatggcttaatcaaaaaactaagactaacaatccccaataatactaaaataatttttttcatcatgctcatctcctaagttaatttaagtatttgaaaatgaaaaacatagcgcttatatgtcattttatattataaagtaacattttacgattcatatcaattataccaaataatttagttgtatcatgttaaattgtataataataaaaaaatatacgctttattttaattttggtgctaagtgaataagcaggaatcaatgtattacgatttaatcagcgaaggtatcatttttatataaaaaagttcacctatcaattcaattaaagtctgtgtgatgatcactgttgtggttattgtaacccactgatctggtaatgataatgctaggggaagtacgactaaggcatttctagtgcttgtactaaaggctaatgtccgtaaaatggatggttttaaatggaaaattttacccgtgaaatatccgataaaaggagcgattagcataaagataatatataaaggcgctactttgacaacaaccgataagtcattagcgattttattaatttgtgaacctaccacggtaaataataccagtgacataaagagttcaggtagccaagacgttgcctttaaagtctgtgacatcacataatattttttactcaataattgtaaagtcaatgcgagtagtaatggaataattataaatgtgaaaaaagaatgtataaacggctctatatcaattattgtaagtatggatttatctaaaaacattgttaaatacagtggtaataataaaatttgtaaaacaaataaaatgggtgttgagataagcatatattgagcgttgcctttacctaaagcagtgaaaacaatgacgtaatcaatacatggtgttaatagtactagaaatagcccaattaatattgcagatgagcttatattgaaaatagaaattaaaaagtaaacgagaataggtagaatgacaaaattagcaatgataagtgctgtcacaaattttaagtttaggacacgcttttgtaattcgaaaaaggggatctgtgaaaacatactaaacataagtattgcgatacatatagctactaaagtttctaaaatgctagatatacctgggaaattggtccctatcagtatgccaagcattattgcagaaaaataaatatagatttgaaagtgttcaatttttgttttgaaatgttgcatagtaacctcactttactgtatatatgactgaaaatatgaatggacatagattaaaataaacctcacaattctaaagttgattgaacgaaagaatgaggtttatttagtgttacaggttatgatttttgttccgcttgcacgtttactttattttcaattttatcttcatttgaattgtcgacactcaataataaagcgcgaacgacaagtacaccagttagcaatagtaatagatttttgaataatttcattcccatcacacacctatcttattaaactgagttacgcactgtttcatgacatgaggtaccacaactataaagttataacgattattaaatatatacccgtttttagtaattataaaggcgtttaaatatccttaataacaatttgtttattggcttttttgacttcggcaacaagggattgactattgttttcgactgaagtatcagtaacttcgtcattttcaatagtaaaaaatacttggcttaaaatgcccatagcatagtcgttaattggactgactaaggaaattgaattttcatcttcttgaatagcaaatgcttgtttactttgattgattagctgccattcaggtaaataagttaatttcataaataacactccctaaggtgaatctaaatggttaaattgtattgattatattataaactaaatgtatcaatgaatatacaatttcaagagatttacaatagcgcagttaaattgaatttttaagggaataacatagtgataataaaaatcattagaggtgatgttatgaattttcttattattgtaatacttagcctcatttttgcatttttagcaacgatgccattcttatttattaataccaggttgcatgaaaatactaatcactcaaaagatgaggttcaacatgagagggtgcgagcagttaaacgctttgtttacttttttattttagcaatagtgattttgttaatttacacttttttaactgattaaagattaaaatataagatgaacgtatgaattatagctggatgcttaagttaaactagcaaaagtcatgctatagaaagtatatttttaaataattttaactatgctagattataaaaaagccctgcaaagtcgttttcatttagtaaatgtctactttgaagggcgcatccgtattaaattagagattctttggtacaatatttaactaaatatgagtgcaaataggatacctacaacaccaaaaataagcaacattactgtaacgcctagtaatgattcttttgcttgttcagaacctcttaatttgtatgtgataagtgaaacgataccacaaattaaaaagacaagagatagccaaaaaacaatcatgaaatgtagattcaaatcactacacctcctttaatatgtttaaatgtttatagtgagttcaataaaattaaatcattgaacaagttttgttatatctcatagccttatcatcttatcactaattaacaaacagcaatagggaaaatattgaaattactgttttatatttaagtgtaagcagcgataatacaaattatagtgaagtttgaaaaaagggaaaataggtaatttaaaactgtgacacgcttttatagggggatatcgaattcaatggaagataataatttaaaacaattgaaacaaagcatcgaatcactacaatccaaaaatattgatgaatatcaagaatcattcgaaaaagttgaatctgaaattgtacaacaaaaagttgaggtaagaaattcattaatgcctgataataatcaagaagatgaacgaattaaggatattgcaaataagctaaacgaacatattaagactggctttagtgagtttgaaaaggtagatgaaattctgaattatttagaacctgcttttcaaagagggaaggtagataaagcatatggacgtgcacttgtacttttagtagaaaatacaatgattgaacaagtgaaaatacattttgaacattcaaaagataatgccagattaatggattttatcttagataagttaatagaattaagtgcagaaatcatgccagataattatacagaaattttgagattagaaaaaagattctttgagttacgatatagtgaaaagtaatatactttaaattaagtagctgattaatgtataatatgagtaatataatgaagataggagatagaacgatgaatgaagtaaataaagtaatttacattgttttagccgttttcttgggtagttttggcattcacaagttttacgcaagaaaaacaggtatgggtattcttttcctagtattttgttggacagggattccacaaattttagcgattattggcgcaattttaacattattcaaaccagcagatcaaaacggtaatgtcttagtctaaaaccaatacaatttaggctgagtaaaacgaaatgaaatttagtttttggatacaaacaaaccctacgcatatgaatgcgtagggtttgttttgttaatatattaatatatgacaataaaaagtgggctgatacggatatttcactcagctttaaaatatattgttagagattaacatataattaaaaaaactttataaaatttacaattcttaattaaatcttgtggcgacagtaaacaattaaaaaacttttaaattttaaaatgtatcgtaatagacaaatagttattatttgttatgattaaataaagatttgaaaacgattaacagtgtaacgaataaaataaagatggtcgaggtaacgcttatgacattttatgattttgtaattggttttattgaagacgatacaccgttagggcaacttgcacataatatcatgggagataaaaatttccctagatatgaaacaagttctattaagttaaactcgtatttttatagtcattattttgatcacgaagtattagcatccgcaaaaagagcattgagtttataccttaataatattgaacttagataattaaaaagaagtttacttatcgtaataccaattttgttttctcaaagcgtctctaatgtcttgagttttaaaatttatttcgttatttctgatcgagaaaggttcaattatattttgagccatccatgagttaatgagttccttaggtaaaccatctagttccatatcacttttacttacaacaaagcattcccaatcaagtgaaactttagacggattaacgtaattacattcattaagttgattcataaaaacactccttaatattgtaaatccgacgttaacttttacccatgtatgttgaaaatgaaacgatattcataaaataaattattattatgtcatttttttgaatcattcataaagcatatataaatttgaaagtattttatagaatagtgctgttgcggtttaaagaaatataagcttaaatataactaattttgtgaacttattataaaaaaatgacccgaaaaatttcgacatcttaatagttgtaattcaaactgtcggcaaagtcttggctttgttggcagttttttacgcactctttccgcaatcactgtcttagtttgtagatttcggctagcgctgtttccatagaaattgggtcaaatgactgccaatgcaatatgaaaaatatgtcctgcacgatctacatatatgaataaatataaaaaatagacaaatcttccacaaattaatgtggtagatttgtctatatccaaacctacgctatcataatagtcgtaggtatttaaaatctatttttttgctactgtgtatgctttaccaaggtataataccgaggatacaggctacaataatcataaataaactggaaccaatagcccattttatgacgattctttggttttgtccgtattcaatatctaacataccgacaagtaagtaacctgcagcatatagtggacttaatacatgaagcggttgtcctaataccgaagctcttgccatgtcaactttagagataccaaattgttgcgctgattcagcaagtattggtaatacaccataataaaatggatcatttgccataaagtaggtgaatgggccactaagtatcgcagtgattaaagcaaaatggttgcccattgcatcaggaataatgtgtaccaaggcgttagccatttcattgaccatcttagtaccattcattacaccagtaaagataccagaggcaaatactaaactaataacggatagtacatcgccagcgtgtttttttacaactgaattttgaatactgagatttggataattgagtaaaattgcaacgccaaaccaaagcataaacataactgggataggcatgataccaatgaccaaacatacgatcaatgaaatggtaagcaaggcatttggtataagcattttaggtcttttaagtaatgattcttcttttgtatctgtaggtttaatatcatctaagtcaatatctgtataagatgtgatatgttttttggcacgtttacctaatatgtatgcaacgctaaaagcgaaaacaattccggcaatcatagcaggaataattggtacaaatacttcttcagtagtgacttgcagtgaagaaattgctcgtgccgtcgggccaccccaaggtaacatattcataacacctatggatagtagtgccagcgtcgataatgtatataaactcatgccgatttttttataaagtggcatcattgcagtaacagtgataatgaaagtcgttgtcccatcgccatctaatgctaccattgatgctaaaataacagtaccaaaagtgattttaactgggtcccctttaacgacttttataatttgattaatgacaggttcgaataatcccgcgtcgatcatcacaccaaaatagagtattgcgaaagtaagcataatccctgttggtgcaacggtttcaataccatctagcataaatttaccgagacctgcgtaaaaaccaccaattaatgcaaaaattgttggtataacaattaacgcagttaaggctgacattttacgtgtcataattaataccatgaatataataatcatgataaaacctaatatagctaaattcatttgtaatcccccctattttttatattatagcgctttcataagatttgtaaaattaaaatatgcaaaaaactttatattaattaatagggcatataatttgaaaataaaaaagcctctataattaactaaataactttagaattatagaggtttaaatattatattgaattgatatgtaagagattaagctataaatccagaaatataagctgtccatattggataacttaataaaataaatgaaaaaatagatacgcatattgcaaaaatgttcgcaatacgatcgccacgtagacaagcgtaaatgttaattaataagacacctaagataaataagccacctgctaaaataggtaggttaccttctaaaacttttccaattgcaagtaaaggtgttgctaacgtaattaacgacaagaatagtgacaataaggttgtagcatatttcaaagtattcagtcctctcttgtattttaaaatgatatcaatttaaaaaaattaaaactgttttgtacttaattaaaaataatatttgcttatgcgtaggattgcaagttattttaaaatattaagaggtagaatgatatattcatgttaaatgaaacatagtcaatcattaatacaaacgctttattcaccaatatatggcgtattttaattaataggtatcaacggtatgatttattcgaataactcgatatcttgcttgttaaagtagtaaatgagccaatgttcatctacgtaatagtcttcatattttctagcgtgttgttctaaaaccagtgtctcaaaattgagattgctgaaaaatactttgccactaatattatttgaaacaagggaagtcattaaaatctcaatttgtttttcatcacatatttcgaagactttacgcattaacaagtttgatatagatgctcgtgcgttgtgattttcaccttttacacacatgttttccaatgtagctttatgcgctatactatatcgatttgtatgaattaatgtgacagcaccaattaattcctcaccatcaaatgcaccgataatattgtagtccgtagtctccggtgataggattctagaaatatttgcctcttcaagacattttttattttgcagtttccatgccataacctcaagtttcttatcaataccttgtagtaaaagcgcgtgatatataggaagatcttcaattgttaaataacgaatatgagtcatttattccctccttatccagaaaactaaattattaagtataagtactgtagttaagcgatttatatataatactaaaggaaaaaatttatttgagcaatactatatttaattttttgtaaagatatgtataaatttagaattcaagttataaaaaaatatatttttataaagtttaaaccattccttaatataatttttaagtaacgaaattaaataggataattatgctataatatggtgagttatataaatgaaagcggaggcataaattatgggggctttagtaacaatcatagtttctttaatcgtgcttattcttatttctttttcaatattaattgtatgtctgtataaccaatataaagacaattaaaagtatttaaaacatgagacttcaagaacaagcaacaagaactgaatagcaaagaaaacccccgaaattcaatttagaatttcgggggaattacatattaatattaatctacaactgctacatttaagtcaacttctatattaccacgtgtcgcttttgaataaggacaaaactcatgcgcatcttgtaaatatttctctgcttcttcttgagataatacgtttttaacttttgcatcaatagaaacacttaatttagggctctctgcttctggatcatcttctaaacgaacagtcaaagtaacttctggctcagcgcctcttactttattttgttttaagattaaatcgaaagcaccattaaagcatgaagcgtaacctgctgcgaacaattgctctgggttcgtacctttttcagcatcggcttgagctggtggtacaatcgctacatcaattgctttatcatcagtttgaacgtgaccattacgtccacctgtatttgttgcttttgtttcataatttactgccatacttattacctcctaaaattttcatatttattctttacccaacaaataaaatttaaatcattctaagatatcaagaaaatataatttaaggattatttgtaatttttttcgaagttgttatacaattataaatattattaaaaagagggcgtttttaaatgactgaagtaaaagttgctgtaaccattgcaccagaacaagaactctcacaatcaacgatagatgatttaatacagtttcaagattcaattgatattattgaattacgaatcgatcaatggacaaatttaaacgaaattgctatcgaaaaagttgttgaagatcttcaaagtttaaaactaaataaaaagctattagtgacgtatcgaacttcaaatcaaggtggtttaggtgattttggggaggatgactatatacaaattctaaggaaaattgctaattgccaaaatatagatatgttagatatagaatttgatcaaaccagatcactcaatattttacaagaactgattgaactagctcataaaaatcaagttcaagtcgtactatctcaccataattttaaggaaacaccaaagcttgaagcgttaaagcatttattttataaaatgcagcagctagagtcggattatataaaagttgctgtgatgcctcatggtaaacaggatgtactaaacctattgaatgcaatgtctgatactgcagatgttgtttcgcaacatgtagtgggcattgccatgtctaagattggtttaatatcaagaacagcacagggtgtatttggagggtcgatttcatatggctgtttagacacacccaaagcaccgggacaaatacatgtttccacgttgaaaaagcaacttagtatgtacgagtaatttgaaaatatattgtacctgtcttataattgaaaatagttatcattgacgaaagggcgatatataatggaactacaagaagcaattgcgaatcgtagaagtgttaaaatttttaaaagagatatgactatagatgacgacgctttatacaaagcaatcaaacaggctacagatgcgcctaaccatggtctaagagaaccttggagagtagttcatattgcaaaagatagattaggagatatgagtaaacaattatcagaaatagcatttcctaatttacagaaaaaacagcaaaaccattatgaagtagccacacatttaggtggtatgcttgctttaattgtcaaagaagatcctagacaaaaagaaaacttggaaaatcatatggcttttggtgcatttgctcaaaatttaatgctgttattacacgaagcaggtataggtacatgttggaaatcacctgcatatattttcacaccagaaattagagaactctttggggttaaagatgatgaaaaattagtgggcttgttatatttaacagatttagaagacgagttacctcatagagagcgtcactttaatgaaattatagaaaaattttaattgctataagtactgtgatgcattgcatcatattaaaaaggaagctgaaacataactaaagatgtttcagcttccttttattgtttaaaaattaagtgattatttaaacgtttcttctaaaaatgattcaacttgatctggtgatttcgcattagcagaatgtaggtgtgctaatttttcaccatttttgaatacgagtaaactagggatgcccataacgtcattttctgctgcaacatcttctaattcatcacggttaacagtgaaccaaccataatcattgtatttttcttgaattggatcaatccacatatccattgctttacaatcagggcaccaaccagcttcgaattttacaatcactggattatcgctttgaattgtttctttaaatgcatcatttgtgttaataggtttcattgattttgctcctttttttgatattagtaataccattataacggacgattgtatgttataaaaaaaatcagcttattaattagagcgtttttgtaacaaatttgatatattagtgataactagttataggaggtacagaatcatgataaaattttaccagtatcctaattgtacaacttgtaaaaaagcagctaaatttttacaagattacggtgtgagttttgaacccatagatatcgtacagcatacaccaactaaaaatgagtttaaagaaatactagaagtaactgatatcgatattaataaattgttcaatacgcatggcgctaaatatcgtgaattaggtttaaaagataaacttaaagatttaacagatgatgaaaagttagatttattatctgccaatggcatgttggttaaaagaccgctagcgatttcaggtgacaaagtaactgttggatttaaagaagacgaatataaagcaacttggttgtcataaaataataaaggtgattaaattacgttggactattattttgacaaaataatgaaaacgctttaccggtgtttttcgaaaacattataataatttaaagatgccattaaatagttgattgtatgctattcatatggcatcattaatatgtaaaaacatttaggaggggattctcgtggcagtaccgagtgaattaaaatattctaaagaacatgagtgggtaaaagttgaaggtaatacagtaacaattggtatcactgaatatgcacaaggtgaacttggcgatatcgtattcgttgaattaccagaagttgatgatgaaattaatgaaggcgacacgtttggtagtgttgagtccgtaaaaacagtttcagaactttatgcgccagtatcaggtaaagttttagaatctaatgaagaactagaagacagtccagaattcgtaaatgaatcaccttacgaaaaagcttggatggtaaaagttgaattaagtgacgaaagtcaattagaggaattaatgtcagcagaacaatattctgaaatgattggtgaataatattacatagaactccatgatataactatcttggagtttttattttacctttttttatctatattcaaatgagactaatcaaaaaattgttaagactttgtaaatgcagacgtagtcatttgttgtaggtaagtgtatttagctgacaaaaatggattgccataataagatgaaattagaaaactgtaaaggatgtttatggtcactcagtattgtgaagaactaaatagagaaatttactatcaacatttagagggtggatgtcatggcgatactaaaccaagtaattattgtagaaggaaagtcagacaaaaagcgggtaaaacaagtaatcgatcaaccaatcgatattatttgtactaatggtacgatgggtgtcgataaaattgatgaaatgattgatacattatacgataaacaagtgtatatacttgtcgatgccgatgatgaaggtgaaaaaattcgaaaatggtttaaacgatatttaagtgaaagtagacatataagaatagataaacaatattgtgaggttgcacgttgtcctaaacgatatttatccagagtgcttgaaaagcatgggtttacggtaaaggatgaagaaaaagtagctaaagcgaaattggattatatagctgaaagggtaagtttattaacatgaaggtaacaaatcaacaacgcgtcaatatagatgaacatataaatcaggaaaaatatcttatatttggatacacaccgacatgtggtacctgtaaagtttctgaaagaatgttagacattgctaatgaaatattaaaattaccaattactaaaatcgatttgaattttcatccagattttagtcaggaacatgaaatacaatctgtacctgtgttgatgttgatgtcaaaaggtgaagagcaaaaaagaatttacgcatttcaatccgtccctaatttgttagaaaatttaaaataattattgacgaatcattagtgcgatggtaggattaaaaataattaaataacgaaactcttatcacgagaggtggagggatgtgccctttgaagcccggcaaccgtctgtaacagaaatggtgccaattcacataaagttcatagaaactttagaagatgagagaagcaaacgttgctttctctattcttcaatgaacatagggaaagcattttttatttaattgaaacaaagcaatacgaggaggcaacagaatgattgagttaaatcaaatagtcaaaaggtacaaaacgaaaaaacaggacgtacttgctgtagatcatgttgatttaagtattcaatcaggctcaatttttggtgttgttggtttttcaggtgcggggaaaagtacattaataagacttttaaatcatcttgagcaaccaacatcaggagacgttattatagatggtgacattataggtaagctatcaaaatcggacttaagaaaaaaacgtcaaaaagtgagtatgatttttcaacatttcaatttattatggtcacgtactgtattaaacaatattacattcccattagaaatcgcagggatttcacgacaagaagccaagcaacgtgcgcttgagttagtggaattggtcggattgaaagggagagaagatgcttatccttcagaattatcaggtgggcaaaaacaacgtgtgggtattgcgagagcattagctaacgaaccatctgtattattatgtgatgaagcgacaagtgcattagatccacagacaacagatgaaatcttagaactattattgaaaataaaagaagaaagaaacttaaccatcgttattattacacatgaaatgcatgtcattagacgtatttgcgatgaagttgcagtaatggaaaatggtaaagtgatagaacaaggcaaagtttcaagtgtattcgaaaatccacaacacgatgtgacaaaacgctttgtgaaggatgacttaaatgatgacttcgacgaatcaattagtgaactcgtgtcacttaatgaaaatgattacgttgtgcgtttgaattttactgggaacaacgcaacggaaccattagtgtcatacataacgaagacacacaatttagatgtcaatattttggaagctaatattaaacatacaaaagacggttctatcggatttttaatcatacaatttgccgttgcaaattcagaaaaatttgaaaaattcaaaaatgatttagaggcacaacatgtatctgtggaggtggttaaacatgggtaattcattaagcgatatcctccgagaaatgtttacaatgccaaacgtaagctgggaagaagtttgggttgcaacatatgaaaccatctatatgacggtaatagcaacaatatttgcatttgttttaggaattattttaggtgtcttgctctttttatcagctaaaagtaagtcaccagtcgctagagtattttatagcattgtttcattcattgtgaatttattcagagcgattccgtttatcattttaatcttattgttaattccatttacaagtttagtattaggcacaatcagtggtctaacaggtgcattgccagcattaatcatcagtgcagcaccattctatgcaagattagtggaaatcgcatttaaagaaattgataaaggtgtaatcgaagcggcttggtcaatgggagcgagtacttggactgtagtgagaaaagtacttttaccagaagcaatgccagcattagtatctggcatcacagtgacagccatcgcattagttggttctacagcagttgcaggtgtcatcggtgcaggtggtttaggtaacttagcttatttaacaggattcacacgtaatcaaaatgatgtcatatttgtttcaactattttaatacttattattgtgttcattattcaatttattggtgattgggcaacaaataaaattgataaaagataaattcataaaggggagatttttatatgaaaaagttattaagtttagcttcggtcgttgtgcttgcgcttgttctagctgcatgtggtaacggtggtggcggtaaagataagacgattactgttggtgcttcaccagcgccacacgctgaaattcttgaaaaagcaaaaccgttattaaaagataaaggttatgatttaaagattaaaacaatcaatgattatacaacacctaataaattattagataaaggagaaattgacgcaaatttcttccaacatacaccttacttaaacactgagaaaaaagataaaggctataagattgaatctgcaggtaatgttcatttagaacctatggccgtatattctaaaaaatataaaagtttaaaagatttacctaaaggtgctactgtctatgtttcaaataatcctgctgaagaaggtcgtttcttaaaattcttccaagacgctggacttattaaaattaaaaaaggtgttaaaattgaagatgctaaatttgatgatattgtagaaaataaaaaagatatcaaatttaacaataaacaatcagcagaatatttaccaaaaatttatcaaaaggaagatgcagatgccgtcatcattaactctaactttgccattgatcaaaaattaagccctaaagatgattctattgtcttagaaaaagcgaaagataatccatatgcaaacctaattgcagttaaagatggacataaagacgataaaaaaatcaaagctttaatggatgtattacaatctaaagaaattaaagattacatcaacgatcattacgatggtgcggttgtaccagcaaaataatattgaattaattaacaaaccctttaactccaatagttaaagggttgtttttgtgtctaggatattgtaaaagggcattatttaaaactacaactacaaagtaaaagacgagtgttagttattttttacgttccacacgtaaacaaagcatagttactatacgcttgtttttcgttattattactaaacgcgctatagtttgaagtatttgtgatatagaaaagctcaaatgaatggctaaatttaattttaatgtctttcaaaaaatttgatatttggaaactaatattaaattttgctctgtaatgttcattaattcctaaaatttaaataccaattaaaaacactttagtttttcaatttttaaatcaaattaaccattggaaactttgtataatgtctttacttaaattaaatgagttcggttgatgctttaatcgttttttatataatttgcctgcatcttcttctttgattaggatgtccataccagcttttgttactaaagtggaagaaaattgaataataagtatgtcggaatctaaataaataatacgccacttgctagagaaacatcgtaacaatcctttgcctgtccaagtaaattgatcgtcctttaatttatcgtaacctaagatagattttgttttgtattttgtttgatactgtactttgtctagcaatattaatggttccttttctattattgaataagagatagaaggatttgcttttttgccagaagtccacatattaaacgttgacgcaataatcttccatttaccaggcaaatgtttaatgtattgaatattgatcgctcctctgcataagttattttgttatatagaattaaatttacaaaaaagcgcaataggtcacgtcttatgatatgtgcctattgcgcctatgttttattattttatgttaatcgtgttcatctttaatatcgccgacgatattttctaaaatgttttccattgtaatgatacctatagcttgttgattttcatcttcaacaagggcgatatgaatttgttgcgatttcatttgttcaagtacctgatgatattttgtagtcaatttaattttaaggatatcgtgtgtgatttcctgaactgaagtgacactgtcatttaataaatcttttgaatgaatgtagccaacaatgttcgttggattatctttgattaccggaaatctagtatagtttgcattgtttacataagattttgtttcatttatatcgctatttatatcgataacagaaactttttctaaaggtagataaccgtcttttattttcatttcatcaaaagcgaaagcacgattaatatgagttaattcgttttcagagatttctccaccttcgtgactttctttaattaatagctttaactcttcttctgaatgatacaattcactttctttagcaggttgcatgccgaacatttttaaaattaaacgcgccgaaccattaagggtatatataaatggataaaatattttgtaaaacataatgattggtttggcaatgattaatgtgatttgttcagctttttgaattgcaatggtcttaggtgccatttctccaacaacaacgtgtaagtaagtcgcaataacaaaagcactgattaaggtgaatatatggatcattgtttcagaaagtccaatactactaaataagggatgtaataaaaattcgaaagtggattcaccgaccatacctattcctagagcggtaattgtgatacctaattgacaagcagctaggtattcatctaaatgcgttacgacttttttagcggcaatcgcatttttattatttccactagcaagtgaattgatacgagatgaacgtactttgacgattgcgaattctgtcgcaacgaagaatgcagttaatgcaagtaatactataaatgtgattaaactaataagggttcccaaaaattaattaattcctccattgatttgttattcaatctataccaattgatattctattatataaaaattaagaattcatggctagtgtaacgtattacactgagtgattttttttgaagcatgattataatttaggttgaaactgttaatcggcggtcaccctacctaatctataactgatcacaaaacctaataacagcgtaacgattgatacaatccaaatcattattgtacttggtaaaccggggaatacagcatatagtgaaccaattacaaatcctatgattaatgcgtatgttaaataagtataataagacaataaatattggattaatttactagaacacaagaatccaaataatacaccacaaccgacagtgattaaaataggtaaggctgcaaagttaagtgaaacaaattcagaaatagcatacatgattgtaccgtaaacaccgaatacgagtaacataaatgatcctgaaatgcctggtaataacatcgcacttgaagcacatgcgccagcaataaaatattttaatataaggcctgttgaaagtgatagtgtttctcccgcatgcttatcaccactattcatcacagtcatcattactatgacgataatgcctacaactaataataaataatgcggtgttgtaaaagtgtgtttgaatcgagaagtttttaataaataggggatgataccaccaattaaacctacaaagaagaacattgttggaacagtatgcgtactaagtaaatagtttattagtttactaagtaaaccgattgcaactaccatgccgataccgataggcagtaaaaactttaaactttcccaaaaacgttttgaaaaaagaccactgatagaatgtatgaaatcatcgtatatacccagtaagagcgcgattgtaccaccactaacaccaggtacgagatctgtcgtccccatcgcaaaacctttccaaagatttgaccatttgatttttgacatattcaattcctttcttaaataaaatgtattaatgataatagcataatatggcctattacaataatgaaacacgtaaaataaaaaggatgtaaaaaatatatttttgattatattgcgaaaaattaccattgagaacatgatatcgttttttatcagttaagaaatacttactattattatcgaaaatgattgtgttttaataacgattttaatttagcacttgaaaaggtttatattcacttataactacgttataatgagatgatgtaacaagggctcagtcttttgactgtagattaaaattattataaactagataggaaaacatatcatataatacggagggaatatgtatgccatcaacattagaaattaaagacctacatgtgtctatagaagataaagaaatcttaaaaggtgttaacttaacaattaacactggtgaaatacacgcaattatggggccaaatggtacgggtaaatcaacattatcatctgcaatcatgggacaccctagctttgaagtaactcaaggggaagttatcttagatggcgtcaacatcttagaattagaagttgacgaacgtgcgaaagcaggtcttttcttagcaatgcaatatccatcagaaatcactggtgtaactaatgcagatttcatgcgttcagcaattaatgcaaagcgtgaagaaggcgaagaaattaacttaatgcaattcattaagaaacttgataaagaaatggactatttagatatagatcaagatatggctcaacgttatttaaatgaaggtttctcaggcggagagaaaaaacgtaatgagattttacaattaatgatgttagaacctaaatttgctattttagatgaaattgactctggtttagatatcgatgcgctaaaagttgtttctaaaggtatcaaccaaatgcgtggtaaagagttcggttcattaatcattacgcactatcaacgtctattaaactacatcacacctgatcacgttcatgtaatgtatggtggtaaagtagttacttcaggcggtcctgaattagcgaaacgccttgaagaagaaggttacgaatgggttaaagaagagttcggtgctgcagaataagtctcaactcatattaaatatattaatttagatgaagatttaaggtcttgatttaagccgatgaattaaatcatataatcatcaaatgggaggaaaatagtatgacgactgaaactttgaacatttctgaagcgcaacttgttgagtattcacaagcccataatgagccagcttggttaacagaattacgtaaagaagcgttgaaattaaccgaaactttagaaatgccaaaaccagataaaacaaaaattaatagatgggattttgactcatttaaacaacatgaaacgacaggcgatgtatatcaatcattagaagcattgccagaagctgttaaagagattattgatattgagaactcagaaaatttaattatccaacataataatacacttgctttttctaaagtttctgactctgcaaaaaatgacggtgtcattgtagaaggcttagcagatgcgttagtaaatcacccagatttagtgaaacaatatttcatgaaagaagcagtagttgtagatgagcatagattgactgcgttacacacagcgttattaaacggtggtatgtttgtttacgtacctaaaaacgttgtcgtggagcatcctattcaatatgttgtgttacatgatgacaaccaagcaagtttttacaatcatgttattattgctgctgaagaaagtgcggaagtaacgtacgtagagaactatttatcaaatgcagacggtgaaggcaatcaactaaacattatttcagaagtaattgctggtgctaactcaaaaatcacttacggatcagttgattatttagataaaggctttacaggtcatatcattcgtcgtggtacagcagatgccgatgcgaagattaattgggctttaggtctaatgaatgaaggtagtcaaattattgataatacaactaacttaatcggtgatcgttctgaaagtgaattgaagtccgtggtagttggaactggaagtcaaaaaatcaatttaacttctaaaattgttcagtatggtaaagaaacgattggttatattttaaaacacggtgttatgcttgaaagtgcgtcaactgtatttaatggtattggttatattaaacatggtggtacgaaatcaaatgcaaaccaagaatctcgtgtattaatgctatctgaaaatgctcgaggagatgctaacccaatcttattaattgatgaagatgatgtagaggctggacatgcagcttctgttggtcgtgtagatccagaacaactttattacttaatgagtcgtggtatttctcgtcaagaagctgaacgtttagttattcacggtttcttagatccagtagtacgtgaattacctatcgaagatgtaaaacgccaattgcgtgaagtaattgaacttaaagtaaacaaataattaacaaaaataaatgtagtcaaggacagtagtaattaaattgtgatgtcaaaatttgaacgtatgtaaatggttattaaatacgttttacaagttatgattgaacctttactaaggtctgattattgattcttaattaaggaaggcctgtgaataatttgactgatacattaaatgttactgaaattataaaagattttccgattctcaaccaacaagtgaatggaaaaagattagcgtatttagatacaacggccactagccaaacgcctgttcaagtgattgatgttatggcggattattacaaacgttataactcaaatgtgcatcgtggtgttcacacacttggttcattagcaacagatggttacgagagtgcacgtgaaacagtcagacgtttcattaatgctaaatattttgaggaagtcatttttacaagaggtacaacggcttctattaatattgttgcacatagttatggtgacgcacatgtttctgaaggtgatgagattgttgttactgaaatggaacatcatgcaaatattgtgccgtggcaacaattagctaaacgtaaaaatgcacatttgaaatttataccaatgactgaagatggacaattagcgttagaagatgttaaggcaacaatcaatgataatacgaaaattgttgcgattgcacatgtttctaatgtcttaggtacgattaatgatattaaagcaattactgaaatcgcacaccaacacggtgcaattatcagtgttgatggtgcacaagctgcgcctcatatggcactagatatgcaagcgttagatgtcgatttctatagctttagtggccataaaatgctagggccaacaggtattggtgttctgtatggtaaacgtacgctacttaataaaatggagcctaccgaattcggcggtgacatgatagattttgtaagtaagtacgatgcttcatgggcagatttaccgactaaatttgaagctggtacaccattaattgcacaggcaattggtttggccgaagcaattagatatttacaaaatattggcttcgaagcgattcatcaacatgaatcagaattaactgcatacgcttatgataaaatgtcagaagtagatggtattgaaatttatggacctgccaaagacaaacgtgcaggtgtcattacttttaatatggttgatgttcatgcacatgacgttgcgactgcagtagatactgaaggcgtagcagtaagagcaggacatcattgtgcacaaccacttatgaaatggttaaaccaatcttctacagcgcgtgcaagtttttacatttataacacgaaagaagatattgaccaattcgttgaagcattgaaacaaacgaaggagtttttctcatatgaattttaataatttaaatcagttgtatcgttcagttataatggatcattataaaagtcctagaaataaaggcactttagacaatggttctatgacggtagacatgaacaatccaacttgtggggatcgcattcatctaacgtttgatatcgaagatggtttcattaaagatgctaaatttgatggtgaaggttgttctatttctatgtcgagcgcttctatgatgacagaagcggtcaaaggtcacacattggctgacgctatgaaaatgagccaagaattttcaaaaatgatgcttggtgaagaatatgaaattagcgaagatatgggcgacattgaagcgttacaaggtgttgcgcaatttccagcaagaattaaatgtgccacattagcttggaaagcacttgaaaagggtacagttgaaaaggaaggcaatacagaagagtaaagattcattcgaattgatacgttgacattgtgtaaaattccattcaaactggaaagaacaacaagataaataaacgtgaatatgtatagatagaataatagtctctatgagataaagtaaaaaatgcaaataacagacaaatcaattagcacgttagtcgttttttaatatataaaaggagtgatttaaatggctaaaaaagcacctgatgttgggaattatcaatatggtttccacgatgaagatgtttccatttttagatcagaacgcggtttgacggaaaatattgtccgtgaaatttcaaatatgaaagaagaaccagaatggatgctaaattatagattgaaatcattaaaacaattttataaaatgcctatgccacaatggggtggggatttatcagaattggattttgatgatatcacttactatgttaagccatcagagaacactgaacgttcttgggatgaagtaccagaagaaatcaaacgtacatttgataaacttggtattccagaagcagagcaaaaatatcttgctggtgtttcagcacaatatgagtcagaagttgtttaccataatatggaaaaagaacttgaagataaaggcattatctttaaagatacagacagtgctttaagagaaaacgaagagttatttaagcagtatttctcaacggttgtgccagctgcagataacaaattctcagcgttaaactcagctgtatggtcaggtggttcattcatctacgtacctaaaaatattaaattagatacaccattacaagcttatttccgtattaactcagaaaatatgggacaattcgaacgtactttaatcattgcagatgaaggtgcttcagtgaactatgttgaaggttgtactgcccctgtttactcaacaagctcattacactcagctgttgttgaaattattgttcataaagatgcacacgtgcgttatacaacaatccaaaactgggcaaacaatgtttataacttagtaacgaaacgtacattagtatacgaaaatggtaacatggaatgggttgatggtaacttaggttctaaattaactatgaaatatccaaactgtgtactaatgggtgaaggcgctaaaggtagcacattatcgattgcatttgctggtaaaggacaagttcaagatgcaggcgctaaaatgattcataaagcacctaatacatcttcaacgattgtctctaaatctatttctaaagatggcggtaaagttgtttatcgtggtatcgttcattttggtcgtaaagcgaaaggtgcacgttcaaacatcgaatgtgatactttaattttagataatgagtcaacttcagatacaattccttataatgaagtattcaatgataatatttctttagagcatgaagcgaaagtttcaaaagtttctgaagaacaattattctacttgatgagtcgtggtatttctgaagaagaagctacagaaatgatcgtaatgggcttcattgaaccattcacgaaagaacttccaatggaatatgctgttgaaatgaaccgtttaattaaattcgaaatggaaggaagtattggttaagattttctaatctctaactttcttttataaaataataaaacacgagtaatacctatggttaaagtgtgcatcaagtgatactttaactatagtgtatactcgtgtttttttgatatgatttcagtgtaaacatacaggttcaatgttggaagtaatcatatgcattgcttgccatattacatagtgtataaacttagtgtcatttacgccaactatctaattttgccatgaatttttttgtgtacattttgtttaaaaagaatttttgaactttattcatatcggattattggaatcttttcaggttatatgcgtacattgcatcaaaatctaggttcattgtaaaagcaccatcttggtaacaatgaagacagtattttttcgataaaataccatcactttctgtaccagctggtgtttttttatcaagtggcataccacaactttggcattattgaactttggccatagaaatactcttgtctgttatttaaatttgtagagcaaattatggtgataaagtagtttaacatgaggatgatgaaaaagtgaagctacaccgtataagctttatttcggttttagatatatgctatatcatttaatctatcaggtggaagcgtgtttatcatatataggattagggaataaattatcaaaatataaagttttttaataatgattgctaaaggagtcttgcactgatgattattgctataatcatacttttgtttgcttcatttttcttttcaggaagtgaaacagctttaactgctgcaaacaggatgaagatacaaacagatgcacaacacggaaacaaaaaagccggaaaactcgcaaagttattaagtaaaccgagtgaatttataactacgattttaataggtaataatattgcaaatattattttaccgacacttgtaacaattcttgcagttgatatgggggttaatgttgggttagctacagcagtaactacgatagcaattatcattatttcggaagttatacccaaatctatcgccgccacttatcctgacagaatgtctcgtttgatttatacaccaatttcattttttgtatttatttttaaaccaatcactaagatattaaatgcattaacagatttgataaataaagcactatcaaatggtacagatgagacaaagcgcttttctaaagaagaaattagacagatggtgacgattgcaggcagtgaaggtgcgtttaatgaaatagaacgaaatcgcatacaaggtgtcatggattttgagcaattaaagattacagatatagatacaacaccacgcatcaatgttacagcttttccatcagatgtttcatacgaagatgcatatgagacagtcgtatcaaagccttacactagatatccagtctatgatgaagatatagatgatgtgataggtattttccattctaaatacttacttgcatggagtcgtgaaccagataatgatattttaaactatacatctgaacctttatttgtgaatgagcacaatagagccgagtgggtgttaagaaaaatgacagtttcaagaaagcatttagcgattgtgttagatgaatatggtggcaccgatgcgattgtttctcatgaagatctgattgaagagatgctcggaatggaaattgaagatgaaatggacgaagaagaaaaggaaaaattagaattacagaaaaaagcatatagtgaaaaatagtttttgaggaagtatccatctagtgtgaatttgagttggttgctgatcaaatcaaaacggataaggtagtctgcgtctcgacttgccttagacgtgtattaaaggagtatgttggtatgaaattatctacaagagttactgggttattgaatgtgaaatatccaattattcaagcgggcatggctggttcaacgacacctgaattagttgcaactgtgagtaatgctggtggattaggtacaattggagcaggatattttagttcagatagattagaacaagaaattacttatgttcaagaattaacggatttaccttatgcagtcaatttattcgtaccaagtgataaattatacatccctgaaaaagtggaacatatgaatgcatggttaaagccctatagacgtgcatttaatatagaagagcctgtaatcaatatgactgaaaaacagcaatttgaagatgcgattgacctagttattgaaaaaggtgtgcctgcggtttcatttacatttggtattccagaacaaacagttattgaaaaattaaaagaacgtcatattaaattaattggcacagcaacaagtgttgaagaggcaatagccaatgaatctgcaggaatggatatggtcattgcgcaaggtagtgaagcaggtggtcatagaggcgcgttttctgaaactgcaagccaacttacaccgcttattggcaccatgtctttagttcctcaaatggttgatcaaatcaatatcccagtcgtagcagcaggcgggattatggatggtagaggattagtggctagtatggtattaggcgcagaaggtgttcaaatgggcacagcatttttaacatcagatgaaagtggtgcaagtcaactatataagcatgcaattagtcaaagtaaagaaacggatacagttgtcactaatgttattactggtaaaccagcaagaggcatagagaatgaatttattcataaaatgaatgaatatgatgatgaaattccagattatccgatacaaaatcaactgacaaatgcattgcgcaaagaagccgcaaataaaggtaatgcgcagtggacacatttatggagtggtcaaagtccaaggcttgtacaacatatgtcggcttgggcactaatagaaaatgtggttaaacaagcaaatgaaataatgaatcgataactgcaacgccatatatgaaaaattatcaaagacgagactagaaggcttaatgaattattaagtttctagtctcatcttttatgatacatagtaaatcatttgaaataaaaatctttagttttttaaagttatcgtaaattgaatttaatcaagtgaatatcataaatcatctgtggtatcattaatttggtgatacatatgataaatattggattaacaggttggggcgaccacgatacattatatgaggatttgcaacgaaaaacagataaattaattacatacgcaagtcactttccaatagtggaacttgatgcaacttattatgccatacaacctgaaaggaatataagaaagtggattaaagaaacaccagaacgctttgaatttattgttaaaatacatcaagcactaacacttcatgctgattttcatgattatgcagaaacaagacaaagcctttttgatcaatttaaggatatgttacaaccgctaatggatgaaagtaaactcgctatgatattagttcaatttccaccatggtttgattgtaccgtaccgaatattacatatataagatacgtgcgagaacaattaaaagactttccgatatgtgtcgagtttaggcatcaatcgtggtttaataatcaatttaaagaagaaacattggcgtttttaacgcaacaacgcatcatccatgctgtttgtgatgaaccacaagcaggtcaagggtctataccgctcgtcaatagaatcacgcatgaaaaagcatttgtacgttatcatgggcggaatgttcacgggtggacgaaaaaggacatgaccgacgaggcatggcgcgacgtgagatatctatatgattacagtgaatctgaactacaagatttagtgaataaagttaaagtattagaacataaagccaaaaaaatttatgttgtatttaataataattctggtggtcatgcagcacaaaatgctaaaacataccaacgcttgttgggcatagattacgaaggattagcaccacagcaattaaaattattctaggagcgataagatgttaacaattatattattgattttaattggtggtttgtcagcggtcataggctctttagtaggtattggtggcggcataataatagttccgacaattgtatatttaggtgtggataatgatttgttacacggcataacacctcaaattgctatcggaacatcttctgttatattaattgtaaccggcttatcttccacacttggttatcttaagacaaaacaagttgatgttaagaatggatcgatatttttatttggcttactaccaggttcattaattggttcaatcataagtcgttatctgacattagaatcatttaatttatattttggtatatttttaatcttagttgccatcctattgatggtaagaaataaaattaagcctttaaaagtatttgcgaaaccacaatatgaaaaaacctatgtggatggtcatggggaaacatatcactatcacgtaccaccattggttgcatttgtggctacattatttattggtattttaacaggactctttggtattggtggcggtgctttaatgacaccactaatgctcattgtatttagattcccaccgcatgttgcggtaggtacgagtatgatgatgattttcttttcaagtgttgtcagttcagcaggtcatatcgtacaaggtcacgtagcctggggttatgcaatcatcttaattatagcaagttattttggtgctaaattaggtgtcaaaattaatcgatccattcaatcgaatactgtcgttacattattgcgtgcagtcatgctcataatgggtatatatctaatcattaaatcatttttataaaataagaggagggaaaacatagatgaaattaacaatttatcatacgaatgatatacacagtcatctacatgaatacgcacgtatcactgagtatttagctcaagagagacctaaattgaatcatccctcgctctacttagatataggtgatcacgttgatttgtcagcgcctgtgactgaggcaacgatgggtatcaaaaatgttgaattattaaatgatgcacattgtgatttggctacgattggtaataacgaaggtatgacgatatctcatgatgcattaaacacattatacgataatgcaaaatttgatgtgacttgtgccaatgtttttgatgaacgcggtcaattaccaaataatatctcttcatcatttattaaggtaatagatggtgtgcgtatattatttgtggctgctacagctccatttacgccgttttatagagcgctagactgggttgtgacgaatccattagaagcaattaaagacgagataagtgctaatgaaggtgcttatgatttattaattattatgagtcatgtaggggtcttttttgacgaaaagttatgtcaggaaatacctgaaattgatttaattttaggaagtcatacgcatcattatttcgaaaatggtgaatttaatcatgacgtgcttatggcagctgcaggtaaatatggttatttcttaggtgaggttactttagagattgaagataatgttgtagtgcataaagaagcaacgattcaccctatagaaaagctgcctgaagtagaaacacattttgaagcggaaggcaaggcactccttagtgacgctgtcatagattatcctatccaattacctagaagaacgaacatgatttcacaaacatcttatatgctagcagagagtttgtttgaatttacgaatgcagattgtacgattattaatgctggtttaattgtacaaggaatggatggtaatcaaattacagaatatgatattcatcaaatgttaccgcatccaattaacgcagtgcgtattaaattaagtggtcaagaattaaagcaagtaattattaaaagtcaaaagcaagaatatttgaatgaacatgcgcaaggtttgggttttagaggtgatatttttggcggttatattttatataaccttggatttatcgaatcggaatcacgttattttatcaatggtgaagaaatagataatgatggcacgtatatcttaggaacagttgatatgtatacatttggtagatatttcccaatgttaaaagaccaagccatagattacttaatgccagagtttttacgagatattttcaaggaaaaattgttagaatattaaattgttgtaataatacgttttaatttgttggaaatttcgttataatgattagagatttcaaatcgggaggattgtcatgttatggctactaaaaatgaagaaattttacgtaaaccagattggttaaaaataaaactaaatactaacgaaaattatactggtcttaagaaaatgatgcgcgaaaagaatttacatacagtttgtgaagaagcaaagtgtcctaatatacacgagtgttggggtgagcgtcgtactgcaacatttatgattcttggtgcagtttgtacacgagcttgtcgtttctgtgcagttaagactggtttacctaacgaattagatttagatgagccggaacgcgtggcagaatctgtagagttaatgaatttaaaacatgttgttattactgcagttgcgcgtgatgatttaagagatgcaggttcaaatgtatacgctgaaacagtgcgtaaagtacgtgaacgtaatccatttacatcaattgaaatcttaccttcagatatgggcggagattatgatgcattagaaacattaatggcatcaaaaccggatatcttaaaccataacatcgagacagttcgccgtttgacaccgagagttcgtgctagagcgacttacgatcgtacattagagttcttgagacgttctaaagaattacaacctgatattcctacaaaatcaagtttaatggtgggattaggtgaaacacacgaggaaatttatgaaacaatggatgaccttcgtgctaatgatgtggatattttgacaataggtcaatatttacaaccttcacgtaaacacttaaaagttgaaaaatattacacacctttagaatttggtaaattaagaaaagtagcaatggataaaggttttaaacattgccaagctggtccacttgtaagaagttcttatcatgcagatgaacaagtaaatgaagctgcaaaagaaagacaccgcatcggagaagaaaaacttggtaatgaaattggtacagatacgaataactaattaaaataaggcttagttcattttagatgattgcgtgtatcgcactatatgaactaagtctttattagaaatatgatataaatatgtgagtcattttaatattttattatttataattgagtttatgaaatgacatagattaggtgaatgatatgataaaagtaaatggacaatactttgagataatagaggaatatagagcgtgttttgaagaagaaacgtttgctaacagatactcagatattttggataagtatgatttcattgttggtgattttggatatgaccaattgagattaaaagggttttataatgataataataaaaaggcagagttaagtaaacgattctcaacaatacaagattatctattagagtattgtaattttggctgtccttactttattttaagacgtattccagaaagtgaaattaagacacagttagatgaaagcgaaacaacagaaagtgacgcgatacttgaagaagataaactgcatgatgttaaaattcagcccagtatccaacaatcagagaaataatataagctggcaaacagtgaatagatatttccattttaacaaaacaaaccaaaggcgattatacgcttttggtttgtttttattgattaatattttgaggcatagcgcaagtactatggcatcatgttattgaatgacttcatttaaatatgctgtaatctcgttaccttcgatttcagacacaccaagaatatgtgcgatatagccttcttcttctaagtcatctgtgccaataatgccaaatttatttgtttgcatattaaggacgattgttttcccaaaatggcggttggtttgaactagcattaaatcataacggctgtgttcaccaacaaaaccaacaaattggacttgtgcagattcatcatcatcatatagatacatatcaatcatgtttaggctcctaacaatataagtatttagtttaaattagcttatttaaagcaattttgatcttactaaaagtcttgatttacagtataaccataaatgaatttgtctgcaaagttatggtatgatgagatggataggggtgactaaaatgtattttgttaataaagaacaattgaatactaaattaaattatttacaacaattaattcaagattatcctagccataaagataatcattatgcatttgaacgtattgcgcaaatgtttattgaatcagcggtagacattggtaatatgattatagacggctttatacttagagatcctggtaattataaggatgttatagatattttagcgttagaaaaagtgatatctaaagatacacaacatcaaattaatcaaaccgttgatgtaagaaagcaatttgttcattattatgatgaacttaatacgacgacattgatacccatctttgatgaagcagtgccattttatcaaagttatattgatgaagtaattcagtttttaaaaaatgaaaatgttccaatcacagcttttggtaaaaaaggagaataagtcataatgaaaaattataaagcgtatttaatcgatttagatggaacgatgtataaagggaatgaagaaattgatggagcagcccaatttatttcttacttaaataatcaaaatattccacatttatacgtgacaaataattcaacgaaagaaccagaagaagtagcatcaaaattaaatacaatgggtattgtcgcacaagctgatgaagttgttacatcagctttggcaaccgcagaatttatcgcagaagaatcacctggagcaactgtatacatgttaggtggaagcgggttatccaatgctttaactgcacaaggattggtactcaaagacgatgaattcgtggattacgtagtggttggtttagatgagcaagttacctacgaaaagctttcaactgcaacgttaggtgtgcgaaatggtgctaagtttatctcaacaaaccaagatgtctctataccaaaagagagaggatttttaccaggtaatggagcgattacaagtgtcgtgtcagtttcgacaggtgtccaacccgtatttattggcaaaccagagccgattattatgaataaagccttagaaattttagacttagaccgttcagatgtagcgatggtaggagatttatatgatacagatattatgtctggtattaatgttgatatagacacgattcatgtacaaactggtgtcacaactaaagaagaaatagagaaaaaatcagtaccaccgacttatacttttaaggatttaaatgaagtgattaaagaacttgaaaaataggagtgttcgtatggataaaatcattgttactcgaaaaattccgcaaccttttatagaacaattagaagcgcttggacaagtagaaatgtgggatgagtcacttattccgatgcctagagcgcaatttttagatgccatcaaagatgcaacggcttgctttataactttgagtgaaaaaatagatgaagaagccctggaagcagcacctaacctgaaaattattgcaaatatggcagttggttttgacaatattgatattgatttcgtaaataataaaggtattatcgcaacgaatacaccgagtgtcttaactgaaacgactgcagaattaggattcacattaatgttggcagtagcaagacgaattgtagaagctgagaaatatgttcaaaatggcgagtggcaaagttggggcccatatttgtttgcgggcaaagacttgagtaatgcgaatgtgggtatttatggcatgggtgatattggtaaagcttttgctagaagattaaagggctttaatactaaaatcatgtatcataatcgctctagacatgaagatgccgaaaaagagttaggggcattgtatgtaccatttgatacactattagaacatagcgattttataatatgtacagcaccactcacaaaggaaactcaaaataaatttaatgctacagcatttaaaaaaatgaaaaacgatgcgatttttatcaacataggacgcggcgcagttgtcgatgaacaagcactaatcgctgctttagaaaatggtgacatcgcagcttgtggtttagatgttctacgtgaagaaccgatagatatgaaacatccactcttagcgatggctaatgccgtgattgtacctcatattggtagtgcgtctgtaataacaagaaatcgtatgattcaactatgcgttgataatattcgattagtattaaacaatttacatcctaaaacaccaataaaataataaaaagtatcttgtatttagggattgggactttcaatacatacgtcccaattaaaaagagtctgcgaacatctatggatgtttgcgggctctttttttgatagcaaaaaactgatgtataaagataactgatttttaaaccgtttagtttcactgattataagtgtattaaatataattgtattttgagcgttttaatattttaaaccatctaacatttttgttatatataaaatactttattcgattgtcacaccatcataaaaaatgtataataagttggtaaaatgttaaaatattgtaaatagccttacaaccaaaaatattgttatgtaataaaaaaataatagtataaataataaaagaggtggatgatgagtaaagaaatgaataaaaagcctacctatcaaaaaatgaagccatggttattaacattattatatcttgctatttttatagccttatacttaatttacggttctggagatacgcataataactttatttataatgaattttaatcgaggagaaaattatgaaagatattgtatattcattaattgaaaatgaaaagaattaccccgaccaaattgcaataagacataatgatgaaacaatcaattatcgagaacttaatcaatatacgaatagactagcagaattaataaaagacagtcaaagtccattgatcgtatatggacatatgtcgccttatatgattgtagggatgcttgcaagtttaaaagcaggttgtggttatgtacccatagatgtttcaatgcctgaagatcgaattagttctattattgaaaaagtagaacctgactatattttaaatacgacagaaagtttattagacataaaacataatcatatttttgatttaaatatatttaatgacatggatacatctattaaatttaatgcgctgattgaagataaaaatattgcttatacgatttttacttctggttcaacaggtgaacctaaaggtgtacaaattcgttatgatagtttaaatcagtttacgcagtggatggtcgacctcaatcaattaggtgaaaaccaacagtggttaaatcaagcgcctttttcatttgatttatcagtaatggcgatttatccatgtttagctacggcaggcacgttaaatttagtagacaaagcaatgattaataagcctaaactattaaaccaaatgctagaagcaacacgcattaatgtatgggtctcaacgccttcatttatggaaatgtgtttaatgttaccaaatctttcagaaaatcaatatgatagtttaaaagaatttttcttctgtggtgaaattttgccacatagaacggcaaaaacgttattacagcgattcccatctgcgtatatttacaatacatacgggcctactgaagcaacggttgcagttacaagcatacggattactgaagatatcataaatcaatataatccattacctgttggcgtaccgagaccaggcacaatattgtctttagctgagaatgacgagttagtgataactggtcaatgtgtgagtgctggatacgttaaagatgaaatgcgcactaaggcggtatttaaaacatccaatggacagccaagttattacacaggtgacaaagcgacgaagaagcatgagcaatggtttatcaatggtcgcatagattttcaagttaaacttaatggttaccgtatggaattagaagagattgaatttcaattacgacaggttaatgttataaaagaagcggttgttgttccaatttataaaaatagtaaagttgtgcaattgcaaggtgtagtcattttaaatgaggaagtagatatcgatgctgaacaagctatgatacataacattaaacaagcgcttaaaaaatcaattccagattatatgattcctaaaaaaataatatttaaagataaatttccattaacggcaaatggaaaactagatagaaaacaaatcgctgaggatatacaagcatgattccatatggcacatttacattttttctcatagcgttcattgtactattacctgtcattatcatggggttagttggcaagagaagtcgaatttataatggtatcagtaccatggtgatgattgttctcattttttcttcagaaaaacacaatctttttggactatcatttttaagtgtacagttaattaattttatcttatacattctctggcaagtagccattatcatgttttactggaaatcacgtgcaaaaaataatacattcagtaaattttttgtcgttattgttttatcgatattgccgttagtggttgtcaaagtcatgcaaagctcgtggtttggtgcaacacaattgaaattacatgaaaataaagttattgaatttattggctttttaggtatttcatacgtcacgttcaaaagtgtacaactattaatggaaatacgagatggttcgattaaagaagttaaagtatcgaaagtatttcaatttatatcgttctttccaaccatttcatcaggtccgatagatcgttataaacgatttgttaaagatgaagcaaagattccatccagtgaccaatatcaagaattattacataaggcaattcattatattatgcttggatttttatataaatatatcattgcctatttaattcaagtttatgctataaacccactgttgttggattttaatagttttactactaaatggctttatatgtatgcgtatagtctgtatttattttttgactttgctggttattctttatttgctatggcctttagttatttatatggaatacaaacaccgcaaaactttaaacaaccctttaaagcaaagaatattaaagatttttggaatagatggcatatgtcattgtcattctggtttagagattgtatttatatgagatcgttattctttatgtcgaaaaagagattgttaaaaagtcagttcacgatgtctaatattgccttttcattaaactttttaataatgggaatttggcatggcattgaagtttattatattttgtatgggttatatcatgcagttttatttattggttatggttattatgaaaaatggcgtaaaaaacatccgccaaaatggtcaaatcaatttacggcactattaagtatcatcgttacattccattttgtaacatttggctttttcatcttttctgggaaattgttttaaaatttaggaggaaaatattatggaatttagagatcaagtattagatttattaactgaagtagctgagactaatgtgattaaggaaaatcctgatgtggaattattcgaggaaggtattattgattcattccaaacggtagggttattactagaaattcaaaataaattagatattgaagtttcaattatggattttgacagagatgagtgggcgacacctaataagattgtagcggtattagaagaattacgatgaaactaaaaccatttataccaatcattgtaagtcttgtgctatttggcatctttgtaatattgccagcgagttggtttactggtttaatcaattccaaaacattagctacgcaacgtgttgctctgactgatcaagtattaaaaggtactttaatacaagataaaatgtatcaatccgatgcatattatcctatttatgggtccagtgaattagaaaaagatgatccatttaacccggcgtttttactaaatggtagaaaagatgttccgaagcaaccgtttttaattgggacaggtggatcaaccgacttagtcaatgccgtggaacttggttcgcaatatgaaaacttaagaggcaaaaagatggcctttattgtgtcaccacagtggtttacaaaacatggattaacacatgataatttcaaagcacgaatttcaaagggacaattaaatcgattatttaatcaaaatcaattaagccctaagttgaaacaacgttatgcgaaacgtttattacagttcaaagatgttgaaaacagaccttatttagaaaaagtagcagcaggccatatgccaaaagaaactcaatatctttcaaaatttcaagataatcaattgaaaaaaattgaagcaattaaatcaatatatccattaagaacgtcacctttatcacatatcgatcctgttacacataaaaatagttcgtggcataacattgagtcagcagcggaatcatacggtgaagcgcgtaccaagtcaaatcaatttggtattcgagatgaatattggggtttaatcaaacagcataaacgtaaaattaaccgaaattacgaattcagacaaaattctcctgaatttaatgatttaaaattacttgtagatacgttacgtgaaggtggcgcagatgttgaatatgtgattttaccttctaatggtaaatggtatgatcacatcggaatcaaacaagagagacgtcaaaaaatatatgacaagattgacaatacgattattgatcatggcggacatacctataatatgaccgataaagattatgaaccatatgtggtaagtgatgcggtgcatattggctggaaaggctgggttgatatcgcagaacgtattgagcaacacatgcataaaaaataacgtataaaattaaacaatcctttcaaatttcacagtttatgtgaatttttgaaaggattatttaatgggtttaaaacgtaaaataagctaaataacgtcatattataaatgtataaaacatttagtttaaaatggatggtgaaatattaaaattaaaaaacctagtacacagttttcgtgttctaggttaaaaagtgttcgaaagccattcaatttttgatgttattatatatatagtaagtctatcaattagaatacttgttctacttcgattactcctggtacttcttcatgcaaagcacgttcgatacctgcttttaatgtgatagttgaacttgggcatgtaccacatgcgccatgtaattgtaatttaacaataccatcctctacatctacaagtgaacagtcaccgccatcgcgtaataggaagggacgtagtttttcgataacttctgctacttgatcaaacatcgttacgttttcagttggcataaaaatgcctcctttcaagtaaattatttcattttctacttatctttttattataatagaaaaatagggaaaaatctataaatcaaaacaaaaggggagaaagatatatggataaagtgagcgtcgttgtttatggagcagatgttgtatgtgcgagttgtgtcaatgcacctacttctcgtaacacatttgattggttacagcctttattaaaacgtaaatatccggacaaacaatttgaatttacgtatatcgatatagaaaaagatgtagaaaatctaacagatcatgatcaacaatatattgaacgcatccaagaggatgaattattttatcccttagttacgatgaatgacgaatatgtttcagatggttatgttcagttaaaagatattactaaatttatggaattacagtaaaaaaagaaggcgtctaggtcatttgatgatgtgtcctagacgcctctaaaattagctgtaaatatattgatctcagtgatcattagcattatttgataaaaaactaagccaagataaaaggcttagtttggagcttcaaaacgatttaaccgttatggtatttatacatccataggacgcctgattttaggatagaagctagacgaccagtaacggtgcggtccataatgtatgcgaacccttttttatcaccaagtgatccaaggaacccttgaattttaatttctggcattttttcaggaagtggtttgttttgccattgtaatttcatcacatcagcaatttgatcaccttgagcttccgccaattgcgcgcttggtgcatgaggtaaatctgcacaatcgccgactacgtaaacatttttgtaagtaggcacctgatgatattgatttaaaatgacgcgcccgcctttactgatatcaataggtaggtttctaactaattctactggttggatacctgcagtccacacgattaaatcaagttcttctggtacgtcattattgtaaatacaaccgggttcaacacggttgatatcagagtttggtacaactgtgacatcatgttttttgaaccatttctctatatatttacttaatttttcagggaaacgacgtaaaatacgttctcctctatcatacaggaaaatttgtaaatcactgcgactttcacgtaattcactagctaattcgataccgcttaaacctgcacctacaatacctactttagcaccatttggaagttcactaatatgatggaatgtttcacgcgatttagaaagtgtttgaatactatgtgtgtattcttctgcacctggcacattatgatatttatcttcacaaccaagtccgataacaagttcatcataatcaaccttggtgtgccctacagatacgatttggtcatccaaattaatatcagtaatttcgccataaacgttattgattctatctgaatcaggaaaactcatgcggatatctttgtcagattttgttcccgcagctaattcataaaattctggttttaaaccatggtatggcatgcgatcaattaatgtaattgaataattttctggaagtgctgatggtaaaatatgagacatgatgcgcatattaccatagccaccacctagtaatactaagtttttcatttgtgatacccctctaataaaaattgtattgagcagaaaagatatgataaatttttaaatcattgtagaacatgtccattgcacttcaatgtaaataaaatgtgattaaatcatgctttattctgcatcgatataccaattttctataatcagcttacttagatatattatatgcttttttgtttactactacaaataaagtagacgcattctaatttgtcatcacaaaatttttagataagtaaatattaactttgaaaatcaaataatcaaatgtgattgagactgggcatacattgataaaggtcaactcaatgatcaattgaagcgttaatcaaaatttctgtaagctagtatgtagatatagccccagtgtttttgttataattgtctaactgataattaatgagagggtgtaatatgaatccaatagttgagttctgcatttcgaatttagcgaagggcggagattatgtatacaatcagcttgaaaatgatccaggcatagatgttttagaatatgggtgtttacaaaattgtggtatatgttctagcggcttgtatgcattagtgaatggtgatatcgttgaaggtgaatctccagatgatttattacaaaaaatatacgcacatatagaagaaacatggattttttaggaggtaattgttatgacagtgattaatatgacagagtcagcagcttatgaagttaaagacatgttacaacagaacgatatgcctgatggctatttaaaagtgaaagtaaatggtggtggctgtacaggcctaacttatggcatgtctgctgaagaagaacctggcgagaacgatgaaatattcgaattttatggtttgaaagtattagttgataagtacgataaaccagtattagatggtacgacaatcgattttaaacaatctttaatgggaggcggcttccaaatagataacccgaatgccattgcagcttgtggttgcggtagttcgtttagaactgctaaagtggctgggacgcctgaagattgctaattaaataaattgataaaaaggctatggttcacttaaacaataagtgtaaactatagtcttttgtacgtttatgtgaaataataaacaatatggtcgttagcgcttgaaaatcaacgataaaaactataaaattggtattggatgaaaattgtcttttttgtgaattactttttaaagattgggtaaataaaagacgattgcaacaaaaaaattatgaaagcttaggtgaatgaaatggctcaagatcgtaaaaaagtattagttctaggcgctggttacgctggtttacaaactattacaaaattacaaaagcaaatttcagcagatgaggctgaggttacattaattaataaaaatgactaccactatgaagcaacttggttacatgaagcttcagcaggtacaattagctatgaagatttactatatccagttgaaagtgttgttaacaaagataaagttaactttgtaaaagcagaagtaactaaaattgatcgcaatgctaaaaaagttgaaactgacgctggaatctttgattttgatattttagtagtttcattaggtttcgaaagtgaaacatttggtatcaaaggtatgaaagattatgctttccaaattgaaaatgtattaactgcacgtaaattatctcgtcacattgaagacaagtttgctaattatgcatcttcaaaacaaaaagatgataaagatttagctattattgttggtggtgctggatttactggtgtggaattcttaggtgaattaacagaccgtattcctgaattatgtaacaaatatggtgtagaacaaagcaaagtgaaaatcacttgtgttgaagcagcaccaaaaatgttaccaatgttctctgatgaattagttaatcatgcggtaaattacttagaaaacaaaggtgtagaatttaaaattggtacaccaatcgttgctgctaacgaaaaaggtttcgtagtaaaagtaaatgatgaagaacaacaattagaagctaatacagtagtatgggctgctggtgtgcgtggtagcaaattaatggaagagtcatttgaaggcgttaaacgtggacgtattgttactaaacaagatttaacaattgaaggatacgatgatatctttgttattggtgattgttctgcgtttattcctgcaggagaagaacgtccattaccaactacagcacaaattgctatgcaacaaggtgaacacacagctaaaaatgttaaaaacattttagaaggtcaacctacaaacgaatttgaatacgttgatcgcggtactgtatgttcattaggcgctcatgatggcgttggtgttgtttatggtagagatattcaaggtaaaaaagctgccttcatgaagaaagtaatcgatacacgtgcggtattcaaacttggcggtattggtttagcgtttaaaaaaggtaaattttaataaataaatccattgagatacatttttgaatgtgtcgtatgagatgcaatgaggccgggacatatcattatgttccggcctcattaagcatatagatgtttttatttgaattacataagcagtatcaagaaattactttagacaaatataatttctgtttttaatctacagaaaatagaaattttgaaaattacataaacaatataagatattaattaagcagaaaagaggagaagctattatgaaatttaatattagtaatcatcaagaaagtgacacggatacattagtaatcggagtacctgagcatttaaatcaactagaaacagtagtcgttggaaatgaaaacttaaatgacaagcttaaaacattaaagcaacatcaaattataagtacaaatattgctgctatttctacaacaatgatcaatttaaatgataaatttgtaaaattaattacggttggcttaggtaatgtaaaatcaacccatcacagtgattatttaaaagtatttggtcatttatttcaatatttaaagaaaaacagaattagtcatgtttcattattgtttgatacatttcaagcgcatgagttaccaagagaaacaattgctgaaatattaggtcaacaaagtatgcagtcaatttatgaatttgataattataaaaccgataaatctgcaccatatcaaatcgatttagatatcagtacttccaaagaagggggtatagaggctgcaattgaacatggacaagctattgcatcagccatcaatattgctagagattatagtaatataccccctaatatattgacaccaagcttttatgctgaaatgatacagaaacatttcaatcatactgaggttagcgttgatataaaagatagtaaaacacttcaagaagaaggatttggcttaatacatgctgttggaaaaggctctaagcatggtcctagagtcattactttgtcatataacggtggcaacgtaaatgatgctccgattgcattggttggaaaaggtattacatatgattctggcggttattctattaaatctaaattaggtatgcaaactatgaaatatgacatgtgtggctctgcaaatgtcgtagccatgattgacgcagcacgtaaacttgaactaaagattaatattgttggtgttattgctgctgctgaaaatatggttaatgaaatcgcgatgaaaccggatgatgtatatactgcattgagtggtgaatcggttgaagtattaaatacggatgctgaaggtcgtttagtattaggagatgcagtattttatgcgaatcaattccaacctaaattgattcttgattttgcaacattaactggtgctgcagtagcggcattaggcgatgataaagcggctgtgtttaatcataatgcagacgaaactttacaacatatactaaactgcgcacgtcaaatggatgaattcgtttttgaattaccaatgacttcaacagagcaaaaattaattagaaatagtgatgttgcagacctcgttaaccatacgaatggtcaaggaaaggcattatttgcggcaacatttattaatcattttgcgggagaaacgccacatatgcactttgatatagctggtccagcaacgataaataaacatacacataaaggtcctaaagggccgacaggttatcttgttcctactattgtagaatggatgcgtcatctgaaatagtaagatttgtaatattttaataccataaaaatgggcaacatgatgtaattaacgttaatggttgtccatttttttgttattaatgtctataaaagacaatgacttaaagatagatttataaaccaagttttcatagtattttaaataataatattaaagttaataatgtgtttgacaagtactatcgttattgatattataaatcacatgatactttagttcgataacgtgataaaggagttatgctttgtgataaatgcagttgttatagccgttgtattgatgattgtcttatgtttatgtagattaaatgtagttattagtttatttgtcagtgcacttgtaggcggattaatagcgggtatgagtgtttctgaaattgtatccgtatttggtaaaaatatagtagatggcgcagaggtggcacttagttatgcattgcttggtgggtttgcagcattgatttcttatagtggtattactgacttcttagtgaataaaattatagacggaattcatgcagaaaacagtaagatatcacgagttaaagtgaaaatcattattatcattgctttacttgtcatgagcataatgagtcagaatttaattcccgtacatattgcatttattccaattgtcatacctccattaattagtttatttaatgaacttaatgtggacagaagacaaatcgctattatcattggttttggtttgtgttggccttatgtattattaccttttggttttggtcaaatttttcaccaaatcatacaaaatggctttaccaaagcacatcacccaattgagatgggtatgatttggaaggctatgattatcccatcgttaggttatattgttgggttgatattaggtatttattattatagaaaaccaagaaaatatatccaacatgaagaaattaaaaataatgattcaattgtcatcaaaccttacgtacttatagtaactgtgatttcaatcttagctacttttttagtacaactcgttacggattcaatgatatttggcgcgctcgcaggtgtgcttgtattctttgtttcaagagcgtataaatggacggaattggataaacagtttgttgatggaatcaaaattatgtcatttatcggcgtagtcatattatctgcaaatggttttgcaggtgtaatgaatgaaacaggggatatcagcaaattagtggatagtctaagtggtgttgtaggagccaataaattattgagcattattgttatgtatattagtggattagtggtcacattaggtataggttcttcatttgccacaataccaatcattgccacattgtttgtgccactaggagagtcattaggtttaagtacgatggcgcttattgcattaataggtactgcgagtgccttaggtgattcagggtcaccagcgagtgattcaacacttggaccgacagcaggtttagatattgatggacagcatgatcatattagagatacatgtatacctaattttgtgttctataatataccattgattatttttggaacaattgcagctatgatattatagtattaattctatgcaaatgaggtgtacgttatggaaaatatgctagatgctttagatattaaagtagaaaagcaagaacgtggattaatggtgatgtcaatgccggtaacagataaggtgaaacaaccttttggctatttacacggtggtgcgagtcttgcgctcggagaatctgcttgttctatgggagctgcttatttaatcgatactgaaaagtatgttccccttggattggaaatgaatggtaaccatattggttcaacaaccgagggaaccatatatgcgacagcaacaattattcatgaaggaaaaacaacacaagtttggaatatagatattaaagatgacacagataggttgatttgtgtgatgcgtggaacgattgcgattaaaccgcttaaacgctaaaagatattttacaataaaaattgaaaaacaaacacaaatcattttattttctaatcaaatcatagcaataataatgaaagcgtccgagacaaaatacatgtcttggacgcttttttatatttcaggattcaagtaaatcaatatatttagatgacatagttttatgttttaaataaatgtggcgtcgtttgaagttgtcttttcatagacttctgaaatacgtaaagcagtttctcgtccgcccataatatttctagcaaatggacctaattccaaatcagctaagccgccactgacaaaaagatttggcagccattctaaattagcattaatggatggcaaaccacagtgagtaatgggggcttggtaactatcgacaagttgtttgatcactggctgttgcatgatactttctttaaaacccgtagcaagtagtaaatggtcataatacatacaatattgtttcgtatgtatagcatggttggctatatctgtgatttcatttttatgaatgattaagcgaccttgtgcaatatatttttttaatcttagttccagttcttttggcatagagcctttgtgtctttctttattaatcaaattaaagcgcgcctttgaagatgtcatttggctaaagtatttcatatttttggggcctaaccagcctggatcagcatcaaagtcatgtatggtaatgtcttttttcatccataaatgtattggttcagtgttattcttttttaataattttaatgtaaggtgtgcagcagaaatgccactacctataatgtgagatgcatgatgggtcaaacaatgctcgttttgaaatatatgcgtaacatctggttgattatggaataattcaggtataaaggggtcatgattgcaaccaaatgcgataactaaatgtgttgatttgatccattgattatgacacagtatgtgccattgcgattgtacgcgtttaatttgagaaacagtaccctgaacgtgacaatcatttaaattgtagctatgtattaaatcgtgtgtatgttccataaagatgtcgcgattcggtctcttatatggaccatatgaagcatgggtgtattgttttttcttaccatactgttttaagtgaaaagggtcgggatgtacatgatgtacacatggtgagcgtaaataaggcatatcaatgctttttgtgaaatgatcaaattgctcacacaaattggtatgtgggtctataattgttaactttgtgcaatctagaccaagcgatcttaatttgattgcaattgtcacggcgtggatgccaccgccgataattgtccatgatgacaaataaaaacactcctttttaaatcgtaataattacgatttaatatatcgtggactgctaacgatgacaatagtatgttataaacatttttgaacatttacatgcatcttattacgactagacaaagtgtcgatgcatagatgcgtaatttgagcacgaacattttacttcgatacataactttgataaccatgcgatgcgtggtcaagtgcataagattttaaaaacaaagaggggagtgggacagaaatcaaattttttaatagagatttcgtaatcccacctatgcaatcaaggcaaggatgattaggataaaggtttacctgagctaacgctcatgcataagtctcactagcatttttatgtgacatacctcatatacttttgcataagaactactcattttcataaaataagtaattctttaaagcagtgagactttacattttcattcagtcatctactgcctaaacgaaaaagagtctgagacaactatttatgtcccagactcctcaattttgagaataggtatattccaagttctaaaaataccctgtattataattttgtattttttaaatcttttttgatttcatcgtgcttcgttcttttggaagcgggtgtatttaaattatatgcagatttaataataaggtgactggctaatggtccggtaattaaaataaacaagataccgacgattaattgcatattaacgtacccttcacgtccaataaagaataagaacacaccactgattaataacattgcgcctaatgttgcagctttacctgccgcgtgcgctctagcatagacatcatccagacgtaagataccaatggcagcaagagcactgatgagtgaacctattataaccaagataagcgctatgctaatgacgatcgttgttatcatgttcaatcaccttacctttatccatatacttagcaaatactgctgtaccaaggaatgcaagtatacctattaataaaatagcaaccatcatatatttagtacctaagaaaatactaaataaggcgacaatggccattaattgaatacccatcgcatcgagtgcaacaaccctatcagctagagaagggccgataattacacgaactaacatgcctagcattgacaacgcaacgataactaatgcaattattaatatgatattatagttcattcattttctcctacctctctgaccactttttcaagggaagacttgatgctttcaacttcttcttctttcgtactgaaatcgatactatgaatataaatttttgttcgatcatcactaattcctaaaacaattgtaccaggcgttagtgtaattaaattggacagtaatacaatttgccaatctttttttaaatctgtgttgtaagtaaagaatgcaggttcattatcaatgttaggtttaacgacaatacgtatgacatcgatattggctttgatgagttctattaaaaatacaaggaaaagttttatgattttatatactgtaatgagataaaatctacccggtaatacaccacgcatgatataaactaaaagtaatgcgaataaatagcctaaaatgaagttattaaaattataactacctgtaacaaataaccaaaatacagataaaattaaattcactaatatttgaatcgccattttattttccccccaatacgctgtcagtgtatacacttggattgtaaaacgtttctgctgcatctttaatgattggttgtaaccaatctgcagaaagtccaaatattacagaaataacgacagcaacaatggatacagtaagaatccctttatattgtaatttaggatttacttgataaccttctgatttaccgaagaacccttgtaaaaagattcgtatcacagaataaagtacaaccagacttgaaagtaagactaaaataccacttaaataaaatcctttttcaaaagtagcttgaacgatatagtacttaccataaaatccactaagagggggaataccagctaaactaagtgctgctataaagaaagtccaacctagcactgggtagtctttaataagaccgccatatttacgtaagtcatgtgtttttgtaattttatacatgacaccaattaggaaaaataaggctgctttgattaacatatcatgtagcgtatagtaaatcgcgcccatcataccagtttgattcatcatcgctacaccgacaagaatgacacctacagcaatcatgatattatagagtatgatttttttagtatcaaagtaacttatggcgccaacacaaccaaagatgattgtgagtagggcgagaaacagtatagtatagaatgaaaagttcgatgtatctctaaaaaataggctggcagttctagcaatggcatatatgcctactttagttaataaggcaccgaagaaggcaataattgcaataggtggtgcgtaataagcacctggcaaccaaatatacattggaaaagcaccagcttttgtagcaaatacaaagataaataaaataaatataatggttacaatgccactatcttgtgatggtagttgacttaacttttcgctgatatcagcaaggttcaacgtgcctactaccgaataaagcatagctacagcaataacgaagaatgctgaagaagtcacatttacaagaacatatttaatcgtctcactcaattgtacttttgtgccgccaataactaagagaatataggaagccatcaagaatacctcgaagaatacgaacaagttaaatatatcgccggtaataaatgagcctatgactccagttagcataaacataacagcgaagtaatagtaatatgtttcgcgttcaatacctacagattgataggaatataaaatgatgagcattgtgacgatgaggcttgtgatgacaagtaatgcactgaatatatcaagtacaaagacaatactataaggtgcatcccatgaaccaagctctaaagtaattggaccatcttttaaaacattatttaaattaataaaagcgaatattaaagttaatgccgtacctgctaaggcaacataacgtttgattttaggacgtttaccaatgaaaatgagtgcgataatagtgatcattggtatgacgagtaatgaaatgattaagttactctctatcatcttctagcactcctttcatactttctacgttgtctgtgcctaattctttataacttctaaaagcaagtactaagaaaaacgctgtgactgaaaatgaaataacaatagcggttaaaattaatgcctgtggtataggatcaacgtaagaagtaatacctttctcatatataggtacttcacctttttttaaaccgcccattgtaattaaaaataagtttgcagtatgtgtttgtaatgtagtcccaataataatgcgtatcaaactcttagaaagaatgagatagacactcattgcagtgagaataccacatacgaaaatcatcaatatttccattactcattctctccaatcgataagattatagtcattactgtacctacaactgcacacataacacctaaatcaaagaaagtagctgtgtgcatctccattggtggtaaaatacctaatggaatttcaaacggcgtatgcgtgaagaagtttttattataaaaccaacttgccattggtgttgctaaacaaaataataagccgataccgattaatattttaaaatcccaagggaatatcttacgcattgttttaatatcaaaagcgaccgtaataataacgagagcacttgataacaatagaccaccaacgaaaccaccacctggtgtatagtgtccggccaagaataaagatagaccaaacattactatgaggaagaagataacaactgctgaatattgaaaaattaaattattcttctgtctgttcaacgtttttacccccttcatcagatttatcatttttcgcacgtaatttaatcatggtataaacacctaatccagcaatacccaacacggaagactcaaataatgtatcggtaccacggaagtcaaccaatatgacgttaaccatgtttgtaccatgtgctaagtcatagacatgcgttttataaaattctgcgatagaaccgaagtgtctgttaccataagcgattaatccaagtacggtaacgacaataccagcaccaacagaaataacaatattaaccaatttgaatgaacgtgtttctttatgtctatttagattaggtaaatgatagaaacataataagaataatgcagtagaaatggattcaactacaaattgtgtaagtgctaagtctggcgcaccgaagaaaataaagaatatagcaacagaataaccgacagcactggccataattatactgaatagtctggatttagcgaaaataatcattgaagctgctgtaataatgagcactacaataattaattcgaaaggacgtatcgcactgacatctttaaaatcaatattgaaaggtgtaactaataatgtaactaaggcaataacaatgagagatgcaaagataatgactaaattattacgtgtgaatccagtaacatacgtatctgtaaatttgctagagtatctaggtgttacatctccaaatttgttataccagtaattaattgtcagtttagttggttgtttttgtaataaataaatccaataactgaatgtaatgattaatacaataccaacaatataaatgcctaatgtagagaagaaggctggtgtaaagccatggaacatatgaaattccgctgtcgaatttgttgtttgaccaattgcattcaccgcgggttctataatagaacctgaaagtatcgcagggaataacccaaatacgataactaaaatggctaaaattgacggagaaatgagcattaatggtgaaacttcatgtgcttttttaggtaatttatcttctttataactacctaagaaaatttggccaataaaccttattgaatatacaaatgtaaacacactaccgataatagcggtaattggaattaaaataccgagtgtatctaaactaaataagtttacattagtaacttcgatcatactttctaaaaatttttctttagataaaaaaccattaaatggcggtatgcctgccatacttaaagaagtgattaatgtgatggtaaacgaaataggcataatggttaataaaccgcccagttttttgacatcacgggtaccagttgaatggtcaacagcaccagtaatcataaatagtgcacctttaaaggtagcatggttaatcaagtggaagatggctgccgtaaatgctgcgatgtaaatttgactttcagcaccttcaaaatgaaagcttactgcgcctacaccgagcattgccataatcatacctagttgagatacagtagaaaatgcgagtatccctttcaaatcttgttgttttgttgcatttaatgatgcccaaaatagtgtgatgaggccaacagcagtcactgtccaaatccaaccttgagacactgcgaatataggtgtcatacgtgccactaagtaaagcccagctttaaccatagttgctgagtgaagatatgcactaacaggtgttggtgcttccatcgcatctggtaaccaaacataaaatggaaattgtgcagatttagtcattgcaccaattaataccagaatcatagagaaaataaaaaatggacttgtttggatttctgaggcattatttatcaattcttgaatacttgttgttccaccggcaatggaaagtaagataataccacccaaaagtgataaaccgccaaatacagtaacgagcattgatttttgtgctccgtaaattgaggcttgtttatcacgccaaaatgaaataagaaggaaacttgaaaatgaagttaattcccagaataaatataagataattaaattatcagataatacaagacctaacattgcacccataaaaagcaataggtaacaataaaaatgtcctaattgctcttgtcgacttaaatagcttatagaatacagtacaattaaacagccaatgccagttataagtaaactgaataataaaccaagaccatctacatacaaattaaagttcataccaaaatgcggcatccaatttgctttttccataatggtattgcctgacatcgttgttgaaatatatgataaaaaatatataaataagacgacggggataggtaacacaaaccatcctaaatgtatccgtttatagaaccgatatacaaatggaataatgagtgcaaatatcaacggtaatagtaccgctatatgtaacaaactcattatattttcctccttttaaaatttattataaattcattatacatgaattgaagagttctgaaaaacgtgtttaagccttgaaggacttgaaatatatgtgttgttaaataagaagaaacacggtatttttattcaaaattttgtttatattgaagtgaataatctgctttgagacgctgtagattttcaagcgacattgttgcgtgcaatgtattttcagcttttaatttttcttctaaatgtgtaatagcttgttgtaaagatactttatatggtaatggttctacattaaaaggtcttaaatgcgattttttagtgtaacgcttttcatattgactcagtgcttttctttcgtgaaagaaaacattttctgtttctgttggattatgtaaatccccttgtttagggtgtttaatgacttgttcaacttgtacgagtacttgattttcatcttcttccttaatggtaacgccgtaactgccagttttatgtgaaaaacgatataacatgattcattccatcccttcttttatgttagaatacatatatcatcttaacatgaaatggagaataaaaatgacgaactatcctcagttaaatacagaaattaatggtaatgaaattaaattgattatgcacacaaataaaggagatatgacctttaaactattacctgatgtagcaccaaaaactgtagaaaattttgtgacacatgcgaaaaatggttactataatggtgtaacattccatcgtgtcattaatgattttatggtacaaggtggcgacccaacagctacaggtatgggtggagaaagtatttatggtgaaccttttgaagatgaattttcaaaagaagcctttaatatttatggtgcgttatctatggcaaatgctggtccacatacgaatggttcacaattctttatcgtacaaatgaatgaagtacctgaatcaatgttgagtcagttagctgacggtggttggccagagccaatcgttaaagcatatgctgaaacgggtggcacaccatggttagatcaaaaacatacagtgtttggtcaactgatcgaaggtaaggatactttagaagacatagcaaacactaaagtaggaccacaagataaaccattacatgatataacaatcgattcaattgaaatagtcgaataatacgaatgacattgtaaattaaagtacgaattgaaagcctagatcaacccaataaatcgtatgggtatatctaggtttttttatcgacgacttttaaaggcatagacatcgttggcagtaatgtatcaatgtaataatcagcgtggcatacgtatgttttatccattgctgtaatcatgatgaaccactgatttatgtctgcctatgaatgaaatgtgaaatttttctactataatattagtgccatcgtataatgtatgctattataatagtgttaagaaaaacgaaataaggggttatcacgttgaataatcactataaagtaggtcaacatgtcaaagttcgtgtgactggtattcaaccgtatggcgcttttgtagaaacccctgacaatgctgaaggtttaattcatatttctgaaattatggatgattacgtccataatttaaaaaaatttttatcagaagggcaaattgtaagagcgaaagtgatttcaattgatgatgaaggtaaactgaatctttctttaaaagataatgactattttaaaaattatgaacgtaagaaagaaaaacagtcagtgttagatgaaattaaagagaccgaacgatatgggtttcaaacaattaaagaacgcttaccggtttggataaagcagtccaaaaacgcgattaaagatgagtaatttatcttttgaaaaagctgccatttcatgattgaaatggcagcttttttgtttataacattttagcaaatatgacaataaagtgagtatttgttttaaagtatgcgaatatggctatacaaaaatatatgcgtgagcatatttattttaaattaaaactgaggtagctaaaataaaaaagtattaaaaattatccaaactttttaaaagtacatttaggaggaacagtaaacatgaatcaaaaattccaaccattatttgaaaaattaactttaccgaataaagttgaattagataatcgttttgtattagcgccattaacacatgtatcatctaatgatgatggctctatttctaatgaagaagtcgtatatatggaacaacgctcaaaagatgtaggattagccatttccgcagcgagtaacgttaccgatttaggaaaagcattccctggtcaaccatctgttgcacatgattcgaatttagaaggtttaaaacgtttagcgcaagctatgaagaaaaatggtgctaaagcaattgttcaaattcatcacggtggtgcacaatcattacctaatttaacaccgggtggagatgttgctggacctagtccgatttcaatgaaaagttttggtgagcaagaagaacaccatgcacgtgaaattacagtagatgaaattaaagaaacaattaaagcatttggagaggcaacgaagagagtcattgatgctggattcgatggcgtagaaattcatggtgccaaccattatttaattcatcaatttgtttcaccttattacaaccgtcgtgatgatgaatggggagaagaccgtttgaaattcgcttcagaagtgattgatgaagtaaccgaaacggttaaaaagtatggtagtaaagattttattgttggctatagactttcaccagaagaagcagaatctccaggtataagcatggaaattactgaaacattggttaagcatttaattgaaaaaccattagactatctacatgtatcattaatggatatacattctaaaacacgtgaaggtaaatataaaggtcaagaacgtgtacaattattattagaatggatggacggccgtatgccattaattggaattggttcaatctttactgctgatcaagcaattgaagcaattgagtctacgaaagttgatcttattgctttaggtagagaaatattactagatcacaactttattagtaaaattaaagacggtaaagaagatgaaatcatttcacaatttgatcctgaaagaaaagatagacatcatttaccaccaaatttatgggatcaattcaatcgaggattctacccattaccaagaacagataacaaataaataacacatttgaacgcataaattttctgatgaatgaatccagaagatttatgcgttttttttacgaatataatgcttaaacatacaattaaatgcaaaaataataatagttaattttatttttaaatttaaggaaattttcttgtaatcatagttaggattatgtcattatatatgtaagggcttacataattttgacaattgtatatatgaatttaacaatgcaaaaaatagcgtatttaagacgttgaacagtgattgagtaagctgttttagaaaatagtttcagttcacgtgtaaatacgttatgctatgagtgagtattgcttaggagtcatttttgctcttaaatttttacaaaggggagatatcatgtcaagatcagaagaaatcattgaagtaacaaatcattatggtgcacaaaactatgtaccacttccaattgttatctcggaagcggaaggcgtatgggtcaaagaccctgaaggaaataaatatatggatatgttatctgcatattcagctgtaaaccaaggtcatagacaccctaaaattatccaagctttgaaagaacaagcggataaagttacattagtttcacgcgctttccatagtgaaaatctaggtgaatggtatgaaaaaatttgtaagctttctggcaaagcaaaagctttaccgatgaacactggtgcggaagcagttgagactgcattaaaagcagcacgtcgttgggcttatgatgttaaaaatatacaaccagataaggcagaaattattgctttcaatggtaacttccatggtcgaacaatggcgcctgtttccttatcgtctgaacctgaataccaacgtgggtatggcccgttattagatggtttccgtaaagtagattttggtgatattgaggctgttaaagcagcaattaatgaaaatactgcagctattctgattgagccgatacagggagaagcaggtattaatgtacctccagaaggttatttgaaacaaattagagaattatgtgatgagcataacgttttatttatcgctgatgaaattcaagctggtcttggacgttcaggtaaattatttgcaacagattgggataatgtaaaaccggatgtttatattctaggtaaagctttaggtggcggtgtattgccaatttcagtggtattagcagatgaagaagtattaggtgtattcacacctggttcacacggatcaacatttggtggtaatccacttgcttgtgcagtatcaaatgcagcgctagatgtcattatcgatgaagatttaccaggacgttctttagagttaggtgattattttaaatcagaattagaaaaaatagaccacccagcaatcaaagaagtacgtggacgtggattgtttatcggaattgaacttaatgaagcagcaagaccattctgtgaatctttaaaagagcaaggtttattatgtaaagaaacgcatgatacggtaattagatttgcaccaccacttattatttctaaggaagaattagactttgcattagacaaagttagaagtgtttttgagtaaattcacacttctgtaacatatgttctgaaacccctttaaaaaggtgaatcttatgttacaattatcatgaaagcgaaatcattagtaacgaaaaagaggcgaaatgaatcatgactgagaataataatttagttacttctacgcaacaaattattaaggaagcattgcataaattgggatttgacgatggtatgtatgatttggtaaaggaacctttacgtttcctacaagttagaattcctgtacgtatggatgatggtactgtacaaacatttactggttatcgtgcacagcataacgacgctgttggaccaacaaaaggtggggttcgtttccacccagaagttgatgaagaagaagttaaagcattatcaatgtggatgacattgaaatgtggcattgtagatttaccatacggtggtggtaaaggtggtatcgtttgcgatccacgtcaaatgagtattcatgaggtagagcgtctatctcgcggatatgttcgttcaatttctcaatttgttggaccgacaaaagatattccagcaccagacgtatttacaaactctcaaattatggcatggatgatggatgagtatagttcgctagataaatttaactctccagggtttatcactggtaaaccgattgtattaggtggttcacaaggacgtgaccgtgctactgcactaggtgttgtcattgctatcgaacaagcggcacaaagaagaggactaaatcttaaaggtgcgcgtattgtcatccaaggatttggtaacgctggtagtttcttagctaagttcttgtatgatatgggtgcaacaattgttgggatttcagatgcgtatggtgcactacatgatccagaaggtttagatattgattacctattagatagaagagatagttttggtacggttacgaacttatttgatgaaacaatttcaaataaagaattatttgaaattgattgtgatatcttagttcctgcagccattgcgaatcaaattactgaagacaatgctcatgatattaaagctgatattgttgttgaagcggcaaatggaccaactacaccagctgcaacacgcatattaactgaacgtgatattctactcgtacctgatgtattagcaagtgctggtggagttacagtttcatactttgaatgggtgcaaaataaccaaggttattattggtctgaagaagaagttaacacgaaaatgcgtgaaaagcttacaacagcctttgacacaatttatgaattatctcaaaatagaaaaattgatatgcgcttagctgcatatattgtaggtattaaacgtacggcagaagctgcacgttaccgtggttgggcttaagccaatacagatataacaaaaacgacaattgctgtttttatcagcaattgtcgttttttcgtatgttgtttaatggatttaaaaataaaggaataaacaaaaattaatatttattctgttctccttcatttattacttgtttgtatagatctggataatttgtaaatacaccgtcaacaccataatgattcaatcgcttcatatcttctgggtcattaactgtaaatgggtgtacaagtaaaccagcttttttaagatttttaacattttgttttgttaaatcagaggcttcagggcctacaccaattgcataatttctaatttcattaaaatcttgctgagataaagctaataattcacctttatcaagtaaacggattaatggcacatttgagtttagtttctgcattttaagtaaactttcttgtgaaaaagattgtactaaaacttgaccattattaagtgattgtttatttaacatatgatgtttattaagggaatccaataatttttcttccatacctggataaacatcaggcgattttgtctcaatgtagtaattagctgatgttccataacgctctaaaatttcatctagggttggaatttttgcacctttataatttgaattagcatattgcggattttggctattaaatttactgccagcatctaattgttttaattcttttaatgtatattgatccactctacctgttccatttgttgtacgatctactgtttcatcatgcattgcaactaaatggccatctttagtcatctgtaaatcaatttctatgtatgaggcacctatggcattatgactcttatcatatgagaaaaaagtatgttccggtgcatatccgctcgcacctctgtgtgcaattgtcgtgaatttttcgcctgtcaaattttgtactttcttttggttatgttgtgattgattactagacccgctttgttgctttgtagtgtttgactgttctgtataggtattaccgtttcccgaagcttcaataaatgatgaagtacacaaacccgataatgttaaagcagttatactagaaacgattagcttatgtgtatgtttcataatgacgacactccttaatatgaactatatgctcacagtacataaaaaagagggggatgagaatagaatttacagtattataattcaaaataaataaaattaattttaagcttacaattttaaaagaaatatatagttatagaatctaaagtgaagacaatggaaacttttaaaataaagatgaaactgaacctcaaatttctaatagagttttcctagtcatctattacctaattgaagaagagtctggaacatctatttttgtcccagactctaactattatatgtgacctaatgacatattaaaaatctatgcatgtttagtcactgagttctttatgaatgatgtcgagttgttgttgtaccgatgattgacccgtcgaaccgtaactaattcttctgcttacacaattttctggttttaaataatcatagatatccgcttctatcagttcatttgcactctgatattgttctaaaggaacatctaataaatatatattatgttgaatagaccaaagcacaattttaccaacaacctcgtgtgcgctcctaaaagggacacctttattcacaagatagtctgcgagttcagtcgcatttgaaaaatcattgtataccgtttgttgtagacgttcgacatttactgtcattgaatctatcataccgtcaaatatgcgtaatgatccttttaaggtgtgaacggcatcaaataatccttctttatcttcttgcatatctttattgtatgctaaaggtagacctttgagtgtcatcaacatactcatcaagtgaccagttgtacgtccaactttgcctcttataagttcagccatatctgggttctttttttgaggcataatggatgagccagttgaaaaagcatctgataaggtaataaaatttgcttcagctgaagaccaaaaaataatttcctcagcaaaacgtgacaaatgtaccattgttaatgaaatattatgcaatgtttcaacaatataatctctatcactcacagcatccatactattttcatatatggcactaaaatccaaaagtgattgcgtttcatgacgatcaatcggataggtagtaccacttaatgcggccgcacctaaaggagaaatatcaatgcgttttaaactatcttgaaaacgtgatttatctctttccaacatccaataataagttagtatatggtgcgcgaatgaaataggttgtgctctttgtaaatgtgtatagcctggcataatagtgttaatatgcgattcagcagtatttacaattgtatgttgaaactgtgtaattaattcaatcaaagcattgacttcagcttttgtatagagatgcatatctgtagcaacctgatcatttctactacgaccagtgtgtaatctacctccagcatcaccaatacgcttaattaattcatgttcaatatttaaatgaatatcttctaacgaagtatccaattctaaattatcttgttcataatccttcaatatggcatttaaaccttcaataatttggtcgcagtctgaatctgtaatgatatcttgtttcgctaacatttttgcatgtgcaatactcccttgcacatcatactgaattaacgtcttatcgaagtggatagaggcattgaattcatcaacccaatcctcaggttgctcgctaaatctaccaccccatgctttattgctcatctttatagccaccgtgtaacattgaattgacttttgtaggtaaaccaaagatatcaataaaaccaactgcggattcttgattaaatgcgtcttcttttgtataagttgctaatttttcgttgtataacgtataaggtgattgtctaccattgacgatagcattgcctttgtacaatttaagacgtacatcaccagtaacgtgtgcttgtgtactatcaacaaatatttttaaactatctgtaagcggagagaaccataggccattatatatttgttcagaaaattgtttttcaataactggtttgaaatgtgcaacatcttttgtcagtgttattgtttctagcgctttatgtgcattcataattacttctgctgcgggtgtctcatagacttctcttgatttgataccaacgagtctattttctacgtgatctattctaccaaccccatgtttacctgcgagtttgtttaattctaagatgagttcacttaatttataagctgtgccatctaaagagacagggatacctttttcaaaagagagtacaatttcttcggcttcatctggcgcgtcttctaattcgtttgttaaatcatatgcatcttttggtggtgtagcataaggatcctcaagaatgccacattcattacttctaccccataaattttggtcaattgaataaggagaatcatgttgaatagggactggaatattatgcttaattgcataatcgatttcttcttcacggctccatgcccattctcttactggtgcaaatacttttaattcagggtctaatgctttaattgcaacttcaaaacgtacctggtcatttcctttacctgtacatccatgcgcaatacctactgagtttgttttgctagcaatttcaacgagtttttttgaaattaaaggtcttgataatgctgatactaaaggatatgttccttcatacattagattgcctttgattgcatacgatacataatcttggctgaattcttctgtagcatcaataatatgacattctatagcccccatatctaatgctttttgatgtactaattctaaatctttaccctcaccgacatctaagcaacatgcaaccacatcataacctttatctaataaccatttaactgccacactagtgtctaaaccacctgaatatgctaatacgattttctctttcatagtgccacctcatttaatttgattgaatttgtcttttttatgaatttgatatggatagtatagcagatgatgaatgaaaataaaaccattattttacataaatatgcatataatattttgaccttcagtatgaaagtcgatttatagggctttgaatatgaatttatgttataggaaggggaaatgtaatgtatataatagtgaataaactataaagctcattattcttggatgataaggtttaactattatttttgataaacgataggctagttgtttgaatagtcaaaataaacttagtaaaataataatgaaattaaaaacactggaggcaattcaatatgacgcatattcaattagattatggtaaaactttagaattttttggcgaacatgaactacaacaacaaaaagatatagttaaatcaattcataatactatccataaaggtactggcgcaggcagcgactttcttggttggattgatcttcctgttgattatgataaagaagaattctcacgtattttagaagcttcaaaacgggtcaaagacaactcggaagtatttgtagttattggtattggtggttcttatttaggtgcacgtgctgcgattgaaatgctaacttcttcatttagaaatagcgatgaatatcctgaaattgtatttgttggtaatcacttatcatctacttatactcaagaattaatagattatctagacggtaaagatttttcagtaaacgttatttctaaatctggtactacgactgaaccagccgtatcattcagattgtttaaacaacttttagaaaataaatatggtaaagaagaagcgaaaaaacgtatctttgctactacagataaagaaaaaggtgcattgaagcaattagctacaaatgaaggttatgaaacatttgtagtgccagatgatatcggtggccgttattcagtattgacagctgttggtttattaccaattgcagttgctggtattgacattaaagcaatgatggaaggtgcagcgaaagcacgtgaagaattgtcatctgagaatttagaagataatattgcttatcaatatgcaacgattcgtaacgttttatatgcaaaaggttatgatacagaaatgttaattaactatgaaccatcaatgcaatatttcaatgaatggtggaaacaattatttggtgaatctgaaggtaaagactacaaaggtatttatccatcaagtgcaaactacacaacagatttacactcacttggacaatatgtacaagaaggtcgtcgtttcttatttgaaactgttgttaaagtaaataatccaaaacatgatattacgattgaagaagatagtgataatttagatggtttaaattatttagctggaaaaacaatcgatgaagtaaatacaaaagcgtttgaaggtacattattagcgcatactgacggtggcgtacctaatatcgttttaaatatacctcgtcttgatgaagaaacatttggttacgttgtttacttctttgaattagcttgttcaatgagtggttaccaattaggtgttaatccatttaaccaacctggtgtagaagcatataaacaaaatatgttcgctttattaggtaaacaaggatttgaagataaaaaagaagcattagaaaaacgtttataatattttctagtagtttgaagttagattgcttacattaaaatatgtaatgacaatgaaaaagagtgtgacgtttatagcgtcgcactctttttatgcatttttatcgtatgcatacatctaatacatgatagcaagctcattcctgagaccgatttatcatatgctgaatactttatagttttaaataagcaactttacacttataattatatagaatagttataatgagggttgatttaatgacagaggagcaagtacagcattggtttgatatgtttggtagtttaggttatattgcaggtttcctgctaccttttattgaagcttttattccgattttaccaatcattgtgtttatcattgtaaacgtcaatgcttttgggtggtttataggtactgtattagcttgggctgggacagttgcagggagttatattgtcttcttgtttttcagaagattaaataatacaaagtatatgaaaaaggttcagcaacgtacttctgtgcagaggttgattcattttatcgatcgaagaggcgttattcctatctttattttaatgtgctttccatttacaccaagtgcactcgtaaatatcgttgcaagtatgtctcatattaaagcgcatgcttatctaactgtgctgattatttctaagtttatcatgattggactcgttggttggttaggcaatgatattacgactttattctctaatccaacacgattgattacaattgtggttgtcattatcatcgtttggttcgttggaaggaagattgagaaacattttatgagttcgtcggaggagtgacaacttgcgaaaaatattaaaacatttgatttcaattataattgcgattattatagtactgttgattcaagcttttgttattactggttcagtggtgaaagataatacaatgtctccgaatctaaaggaaaatgatcgtatatttgtaaataaaataaaaccaacatttgatttgttagataataatgatattataatgtatcgtaatggtgatgatatccaatatagtagaattattggcaagcctgggcagtcgattgcttttaaaggcggtaagcttattagagatgataggcaagttgatgaaccttttacccaaaacagcatagaaaatttatcacttagggatataaaaaattctgaaagtgatatcataccaccaaatgcttattttgtgctcaatgatcaacgtacgaataagcatgattctaggatattgggctatattaagaaagaagatattatcggtaatgttagtatgagatattacccatttaaaaaattcacggtagacttcaattaaatagacgaggtgtaaaaattgagaaaagagataatcgaatggattgtatccattgtagtagcagttgcattagtattgctgattgttaactttgtggctaaaccgtatacagttaaaggtgactctatggatccgacattgaaagatggagaacgtgtgattgtaaatttattttctaaaaatttaagcggcattgaaaaaggaaatgttgttgtattccatgctacaaaagaaaatgattatgtaaaacgtgtgattggtacagaaggtgacaacgtagagtacaagaaagatgaattgtacgttaacggtaaaaaagtagatgaaccttacttggattataataagaagcataaacaatataattacattacaggaagctttgaaactaaagatatcaatcaagtagatgaaaagaataaaattcctaaaggtaagttgttagtgttaggagacaaccgtgaagtaagtaaagatagtcgttcgtttggtttaattgacgaagatcaaatagtcggtaaggtatcattcagtttctggccgctaaatgaaatgaaatttggattcaatcctgatacagattatggaaagtagataaattgcgtaagagatagaacgctcgcaccaatagatgatttcatagtctattacaataatttaaaaatgaactggagaccaagtaggtttccagttcattttttatattttaagtttgtacagtcttataataaagtgaataaaaaaatagtgaatggtaagtagatatgtaaatattactacattgcttatagacgtatataataagtaaaatgtttatggtaattaattaactatgataggtgtaagaagtcataacaggtagctttatatgttaaaatgtgagtcaaaggagttggcgtagataatggaattaaatgcgtatatcggtagagcaggtactgggaaatcaaaagcgattattgaagaaattaaagaaaaaatgaaacaagatccattaggagatccgatagtattaattgcgcctacgcaaaatacgtttcaacttgaacaagcatttgtaaacgacaaaacattaaatggtagtttgagaacagaggtattgcactttgaacgtttgagctatcgtgtatttcaagaagtcggcggattgatggaacaacaattatcaaaagcaggaacagaaatgatgatatatgacatcatacaacaacatcagtctgaattaaggttatatcaatcacaggtaaaatattatggttttagcgagaaactatatgaacaaatacaggattttaaaaaatatgcggtatcgccacaacaattagaaacgtatattgcggaaaataatttacaaacgagaacaaagcataaattacaagatatagcattggtatacaaacacttagaagatagaatcaatggtgaatatgtatcaacagaggatagtttgcagcggtttatagaaatgatggaccaatctgagtggcttaaacgcgcagaaatttatatagacggtttccacaacttttcaacattagagtatcaaatcatacaaagtttagtaaaatatgcgaaaaaggtgacgattgtattaacgactgatggtgatagagatctttttagtttgtttagaaaaccctctgaatcattgacgcatatagaagaaattgcgaataatttaaatatacaattacatagcagacagtttttggatgtgcagcgattcatacacaacgacttgaaacacttggaacaaaatttcaatgcattacagtttgagcctattccaacagaaggtaatgttgaaattctagaagcttctggcatgcgtgaagaaattaacgaagttgcgcgacgtatcttaagagaaaatcgtgaacaaggtcgtcgtttccaagatattgctattttatatagagacgaatcatatgcttatttaatggaatctatattgccacagtacgatataccatacaacatagatgtgaagtcatctatgacgcatcatccaataatggaaatgatacgttcacttatagaagttatccaaactggatggcaatttgatccattaatgcgtttgtttaaaacaaatattttaactaaaaaatttaaagatagccaatatcttattgatatattagagaactttgtattagagcgcggtatatatggcaagcgttggatagacgacaaatactttgatatagaacaatttagaaaaatgggtttgaaacgccagccattaacagatgaagaacgcgaaacctttgagcgtgtcattcaattaaaaaatgacgtaatgaaaaaagtcatgttatttgaggagaaaataaataatgctagcacagcgatcgcttttgcgactgcattttatgaagcgatggaagcatttgatttgccaagtcaattaatgacagatagagatacattagacgttaatggtgaacataaaaaagccgaagagatagatcaaatatggaatggtcttatacaaatactagatgatttagtgacagtatttgatgatcaaagcatgtcaaaaacgcgcttcttagaactctttgatattggattagaacaactagaatttattatgattcctcagacattagaccaagtgagtattggaactatggatttagcgaaagtggataataaacaacatgtttaccttgtaggggctaatgatggcgtgttgccacaaacggtgactgcatctagtttaattacagatgaagagaaaaagtatttccaagagcagtcatcaatcgaattaagtcccacagctgatattttacaaatggatgaagcatttgtttgttatattgctatgacaagaagtcgtgcgcatgtcacattttcatatgcattgatgggagcgagtggtgatgtgaaagagccgagtccattcttacatcaaattcagcaattgtatacaaatctagaagtacaaaatattcatcatcaacatcaagcagagcctttaaggttaatggaacatcctcatcaaactaagattgcgctttttgaatctttgaaggcatggctagatgatgaattggtagctgaaacttggttagatacgtatcaagtgatgagagatgatacgcgcttaaatgatggtttaacctatttactttctgctttaacatacgataatcagacagttcaactcaatccatcattatccaaagcattatatggctcaaccattaatgcaagtgtgtctcgttttgaaggatatcaggcgtgcccatttaaacattttgcttctcatggtttaagacttaatgaacgtacaaaatataaactagaaaattttgacttaggcgacatatttcatcgggttttaaaattcatttcagaaaaagtaaatggtgattttaagaatttaaatccaaaacaaatacacaagctaacgacagaagcattgagtgaaatattaccagaagttcaatttaatttacttaattcaacggcgtattatcgctatttgtcgcaacgcattggtgccattgttgagacgacattgactgcacttaaataccaaggaagtcatactaagtttacaccacaacgttttgaagctagctttagaagaaaacctaaagatcaaagtgagttattagcaacaccattgcaaacgaaacaaggtataccaatcaatattcgcggtcaaatcgaccgtatcgacacataccaacaaggcgatgaaagttttgtaaatattatagattataagtcatctaagtacagtggtacactagatttaactaaagtatattatggcttgcaaatgcaaatgatgacttatatggatattgttctgcaaaataaatcaagacttggtttaacagatatgactaaaccaggaggtctactatattttcacgtacatgaaccacgtattaaattagcttggaatcaattaagtgaagataaaagagacaccgaatttattaattcgtttaaactcagtggtttattaaatagtgccacatctgtcttagatgcgtttgatacacgattagaaccaagttacaattccgatattgtaccattaggtttgaaaaaggatggcggaattaaaagtaatagtaaagttgccgatgaacagacaatttataaattaattaaacataataaacagaactttattgaaacagcgtcaaatattatggatggtcataccgaagttgcaccaatgaaatataatcaaacattaccatgtgatttttgtaattataaatcagtctgtcatgtagatggcatgattgatagtaaacgatatcgtacagttgacgaatcaatcaatccgcttgaagcaatccaagatgtagatttagaaagtgagggtgagtaatgatgaatgccattccagtgaaaccaacagggacacgatggactgataaccaatggaagagtatctatgccaaaggccaggatattcttgttgcagctgcagccggttcgggtaaaacagcagtacttgttgaacgcatcattcaacgcattatcagagatgaaattgatgttgataaattgcttgtggttacttttacaaatgcaagtgcacgtgaaatgaaacaacgtgtagatcaacgcattcaagaagcttcaattgaaaatccggacaatgcacatttgaaaaatcaacgtgtcaaaatacatcaagcacagatatctacattacatagcttttgcttgaaactcattcaacaacattatgatgtcttagatattgatcctaattttagaacaagcagtgaagcggaaaatatattattactagagcaaacaatcgatgaagtgctagaacgtcattatgatatattggatcctcattttattgatttaacagagcaattatcatctgaccgtaatgatgatcaattaaggaataccattaaagaaatgtattactttagtgttgctaacccaaatccattaaattggctacaacatttgtcaacaccatacgaagatgaatcacagcaagaaacattattcaatttgcttaatgatttagcgatgatatttatgaattctgcgttagaggcactcaataagagttacgatttatttatgatgttggaagaagtagataaacaagtcgctgtattagataaagaacgccgtttcttagcagaagcgatggaaggtggcttgttaaatacacagaaaattgctgaacatcaatttgaatcacgttttcctgcaaaaaataaaaagataaaagaagctaatgaaatgatgatcgatgcttatgatgatggtaaaaagcattatgatgattacaaagcgttagtgagtaaagttcaagaagattatttttcacgtgaagccgctgacttaaaaactgatatgcaacgtttagcgccaagagtcgcttatttagcgcaagttacagcagatgtgattgaacaatttaatcagaaaaaacgaagtcgtaacttactggatttttctgattatgaacattttgccttgcgtattttaatggattcaaacggtaatccgtcagaaattgcggatatgtatcgcaagcaatttgaggaaatccttgtagatgaatatcaagacaccaatcgtgtgcaagaaaaaatcattgcatgtattaaacgtggcgacgaagcggatggtaatttgtttatggttggtgatgtgaaacagtctatttataaatttagacaagcagacccaagtctttttatagggaaatataatcgttttacgctcgatgggtctgaacatggtatgcgtatagatttgtctcagaactttcgatcaagggaagaagtattaacaacgacgaattatttatttaagcatatgatggacgaggcagttggagaaattgtttacgacgatgcagcacagttatattatggggcgccgtttgatcataaaccacatgatgtacagttgaatatgttaattgaagatgcatcatcagacttaaatgggtcagaacaagaggcagaatatattgtacagcaagttgaaaaaataatgtcgcaacatgaaatttatgatattaaaacggaacaatatcgaaaaccgagctataaagatattgtgattttagaaagatcatatggacaagcgcgtaaaattcaacaagcatttaaggatcataatatcccatttcatgtgaacagcaaggaaggctattttgaacaaactgaggtgcaattgattttatcgtttttaagaactatagataatcctttacaagatatttatttagtcggtctcatgcgctctgttatttatcaatttactgaggatgagttatctaatatacgtgtatttagcccaaacgatgattacttttatcaatcgataaagcattacatggccaatgatgtagctaataaaaaattagtagctaaacttgcgtcattccttgaagatatcgaacaatatcaagactatagtcaaagtcatccagtttatcaactcatcgataaattttataatgatcactacgtcatacagtactttagcggcattattggtggtaaaggtcgtcgtgcgaatttatatggattatttaacaaagcggtcgaatttgaaaactcaagttttcgtggattgtatcaatttattcgttttattgatgaacttattgaacgtggtaaagattttggtgaagagaatatagtcggaccgaacgatgatgttgttagaatgatgacaattcatagcagtaaagggctagagtttccatttgttatatattctgggctttctcgtaagtttagacgtgatgatttacatcggccggttatattaaatcagagttatggtttaggtatggcgtattatgatgttgaaagtaatttatcttatccgtcgttatcttcagtgacatataaagcgattgctgaaaaagagatggtttcagaagaaatgcgactcatttatgttgctttaacacgagcaaaagaacaactttttttaattggtagagttaaagatgaaaaaacactttcacagtttgaacaagtatccgtatcggaatcccatttaccggtgagttatcgcataacagcacaacgaccgattgatatgatttatccaatactagccaaataccagtcttcatcattgccaaatgagttgcgctttgaacagacgatagaggacgttgatcaagccatgcgaccatatgtacaattaaacactgatttttatgaagatattgcgtcagaaacagtcactgatgtaagcgaacagcgcacggtagcagatatagaaatgaatcattcgaaaaatgaagcacttcaagctcaaattcataatcaattaagctatgaatatccatatcaatcagctatagaaaagccctcaaagcaatcggtttcggagttgaagcgtcagcatgagacggaacaatcagatacgaactatgatagagttagacaatatcgtattggttctacttcatatgagagaccggcatttttaagccgtagtaagcaaagaaaagcgaatgaaataggtacattaatgcatacagttatgcaacacttaccttttaataaggatagattaaccgaagaagatgtaaaccgtctcgtagatcatctgatagcgcaacatattattcctgaagatgccaaacaagatatccgatttgatgatatctacaattttatagcaagtgacttgtatcaattaattgctgaaagtgacgaaatatatcgcgagttgccatttgttgttaatcaaaatgaggttgaccataacaagcatagtgaagaagatgcttcaattattcaagggatgattgaccttatatttgtgaaagagggacaatattattttgtagattataagacggatgcctttaatagacgaagaaatatgtcagatgaagagattggtgctcaattgagagaacgctataaggttcaaatgaatcattatcgtaatacattagaaacaatattgaagaccgatgtgaaaggattcttgtatttctttaaatttggtcagttatctatagaaggataaaaaggagcgttacacgtgcctgtgaaacaaagaatgtttgaattagatgctttgcgaggaataagtcttttcggcattattttaatgaatattttagtttttagtcttccgtacgagatggcttcaatgtctcagacagtaaaaggctttaatgctgtattactccatttgattacactgtttgttataggttcattttatccgatattcacttttttatttgggtatggacttggtatgatgtttgagcatagtcgaatcagaaaagttcgattttatccaatgatctacagaagacttagctttttattagtcatcggtgtaattcacggtatgtttatcttttcaggtgatatcctatttggttatgcatttacagggctattcgcagtactgtttattaaaatgaaagcccaaaagctaattaaaatagctagtattttatttgtgtttaaaatccttatctttgtggtgccttttgccattttaaattatacgcaaggtgtttatgagaaaaataactatctaggtatatctctgcaacaatttatcgatgttaaacagaatggacactatgattcatttttaaagttgaacgttcttgagaatctatatagtatgttggatattttaatgggatctgcatttctggaatttttaccttatgcccttttcggtattgctgcatataagatgaatttaattgaacttattcgaacaaaaagctcatcctttttgaaatgggggagtttaatagctattttaggctattgtattaaaatgccttttgctattgattatgataatggttcattcgctgttatcaatgctgtaggtggcccgattgtatctgcagggtatattatactcatagtatatttatgtcaaagtgttcatggtgcacaaatcatgcgtatatttaagtatcccggtaaattgagcttatcggtttatattactcaaagtatcatgtttacatttatttttatgtgctttggcttagggttatataacaagttgccattatatcaatcctatctcattgttatcattttttatagcttacaagtcattggttgctatttttatttgaaaaaattcagtaaaggtccaatagaatggttatggcgaaaagtcacatatttgaagtaatcgttttagtttaggtaaaaggtctgaatttttggcttatactagttatatatttgttatttagtggtaaatatagttataatatgaaataagatatagatgaggagctgataatgaatgaaattcctatcattcagacatgaaggacagacatcatatggtgtgaaagtaaaacgtgaagaagctgcatgggacttgaagaaagtatttgcagattttgctgaaggttcatttcaccctaaaacgttattaaatggtcttcaacaaaatcaagtcgtagattttcaagaacaagttcgtaaagcggttgttgcagcggaagacagtggtaaaggtgaagattacaaagttcagtttagcgacattgaatttttaccaccagtcacgccaactaataatgtaattgcctttggacgtaattatcaagatcatgcgaatgagttaaatcacgaagtacaacgtttgtatgtttttactaaagctgcttcgtcattaactggtgataatagcacgataccaaatcataaagatattacggatcaactagactatgaaggtgagcttggtattgtcattggcaaatctggtgagaaaatacctaaaggtctcgctttagattatgtttatggttatacaattattaatgatataacagaccgtaaagctcaaaatgcacaggaccaagcattcttatctaaaagtttaacagggggttgccctgtaggaccatatattgtaacaaaagatgaattacctacgccagaagatgtcaatattgtaaccaaagttaacaatgatattcgtcaagatggcaatacaggtcaaatgattcttaaaattgatgaattaatcgaagaaatttcaaaatatgtagcattacatccaggagatattattgcgactggcacaccagcgggtgttggtgcaggtatgaatccaccgcaattcttacaacctggtgatgaaattaaggtaacaatagataatattggtacgttaacaaactttattgcagataaataatcattgattattgttaactggttaatccatggcgggttaaccagttttatttttttgtaaattagtaatgtagtttttttgaattgtacagttatattgagtatgataagagatgtaatcttttgacttcaaagttaaaaggggacaacatacttctgttttatatatttttgaagtaaaaattgtgtgggggtaatcaagtatgttacatatgcatattgctagttgggttttattaatcatcttgttctttgctgcttattttaatttttcagaaaaacaaggtgcatcaccatatttcaaaccaattcatatgctattaagactatttatgctattagtcttaatttctggattttgggtttggattcaatcattttcatcaggagctgctggtgggcacatgttacttacattgaaaatgatatgtggtgtggctgtagttgcattaatggaagtaacaattactaaacgtaaaaaagggcaacctagtcatggcttaatgtggacgacgattgtagtaatcatcttaacgatgattataggtattattttacctatgggtccaattacgcaaatgtttggtttataaacgtaagtgtataacaataataaaagccgtacaattccattaggaaatgtacggcttttatttatatagttatttatttcgtgctttataacctatcatattaataatatctttgggtctactgtatggtggtgcataagctacttcaaattcaactaattcatcgatagtgagtttatgcatcatagccattgatagtacatcaatacgtttgtcgacacctttcatacctactgctgcagcacgaatgatacgtcgatttgtcttatcaaagtaaacgcgtaagtgcagcttggtatttcctgggtaataaccggcatgttcaccttgatttgcttcgaccattgcataatcaaaatttgaaagctctttcggtgatacaccgacactagcaaatgtataatcgaagaattttacgatatttgagcctaaataacctttaaagtgtatcttgtgatcaccagctaattgttcggcgatgacactagcaccacgatgtgcaccccaagctaaaggaacgtgtgcatttaaatcaacatggcgataatgggacgtaatgatatcacctagtgcataaatatttggaatgttcgtttgaaattggtcgtttactggaatatagcctttatcatctaaagtaacgtttgaattttttataaattctgagtttggtttaacaccaacgccttcgataattaggtcataattttcaactttaccagattcaaaatgcactgcattgcccacaacttttgaaatttcttcgttgaatctataatgaatatctctcttatccatttcatcgaggattgcttgattcatgtcttgatccattagtttattaatatgtgttgaacgatggatgagtgtaggggagatacctctttcatatagattatctaaaatttcaagaccgatatatccagtacctacgacaagtgcgtttttaacttgattttctttgatgaatgtttcaattgcatctgtatcttccatgtttcttaatgtaaacgcaataggactatctaaatttaatgaattggcactacagccaggacttaatattaaagtatcataatgtgtctcaaaatacgtatcctgtatacgatcatagacagtaattgtattctctgtgtcattgattgatgttactttgtgacaaggtttgacaacaatatttttagcttcataaaatgattcaggtgttgcttcaagcaccttattgcgcgaatctaccacgttacctaaataataaggcagggcacaattagcaaaactcatatctctatctttttcaaagacaacaatttcgctttcttgatcaagtcttctaatttgactggctaccgttgcaccacctgcaactgcacctactactacaattttattcataatgaaaagcctccttaagtatctatctatgattctatactagattttactgattcttcataaggcatatttaattggaaatagtcgtttaaataacgtccaatgccatcctcattattagaatatgtagtttgatttgcaacgtgtttaagttcatctaaaccattgtccatcgcgataccgtgtttcgcatatttaatcatttccaaatcgttatcttcgtctccaaaagcaatgatatgatttctatcaatatttaaatatgatttcacataatcaatcccacgtgctttgctaataccttgcttaacaatttctattactgggaatggtgaaccccatcgacgatgttcaatattttcagcgtaaaaacgtgtgagcatttgtttgactctaggaatcataaattcttctgcttcaactaaaatcgatgttggagactcagttaatgagttaagtaaatcgcctgtttcaacttttggatttcccatagagaacccatcgaataatttttgatcgtaattattaataaaaacataatctttaacttcagcaatcatgtttgttacgccataatcattcagtgattcaatgatgtttttagataaatctaagtccaatacttcatgcattggctcaaactgatcgtcttttggatgatgaacaaaggcaccattgaaattaacaaccggtgtatccatatttaattcatggtaatatatttgactggctctataaggtttaccagtagcaatcattaatttatgaccttgttgttgtagtgttgttaaaacgttttttgtatatggtgagattactttttcatctgttaataacgtgccgtctagatctagacaaattaaataagattccatttaattctccttaatgttttttattgatgtattgaatatcatagcattttattggcgttttgtaagatatttgatatattgttagtatcattaaattcgaagaggtgatatgaatggatgaaggattaaaagatagcatattaaatgcgttagaaatggttattgaccctgagttaggtattgatattgtcaacttaggtttagtatataatgttgatgttaatgacgaaggtttatgtacagttgaaatgacattaacatctatgggatgcccaatgggaccacaaattgttaaccaagttaaaatggttttagctgagattccagaaatagcagatacagaagtgaatattgtttggagtccaccatggggtaaagacatgatgtctcgttatgctaaaattgcattaggcatcggctaacgctactaatagtaattgaaaatactagcttaaagatcgataatggtctataggctagtatttttttgaaaaatttaaagcatgctgacaatcttaaaataaaatttttctatagtgcaaatcattaaaataattgcagttatgttacgaaagtattacaatagcttggtgtaaaacattaaaaagcaaaagtaatatattcggagatgaaagtatggtagtaaatgaacagaaattctaataatcgtaatcaaaccaaccgtcacacgcgttatatgcctggtttagatggacttagagcaattgcagttataggtattattatttatcatttaaataagcaatggttatctggtgggtttcttggtgtagatacattttttgtgatttcgggctacttaattacaagtttacttttgtttgagtatgaaagtaccggcattatcaatttgaagcagttttggttacggcgaattaaacgtttgataccggccgtattggtattagttgttacagtaactttagcgacactcatttttaagcctgaacaaattataagtataaagcatgatgcatttgcagccattttttatgtatcaaattggtggtatattgcaactgatgtaaattattttgaacagtttgcctttatgccattaaaacatttgtggtcattagcaattgaagagcaattctacatagtttttccaatcgttttgatagcattattattaacaattaagaaataccgaaatgtaacacttattttttggattatttcactgatttcattacttttaatggtttggatttctcaaccacatatgcaacattctcgtgtttattttggaacagatacaaggttacaaacgatgttgctcggtgttatattagcctttatttggccgccatttaaattaaagcagaaccctaatcctagtctcaggttcattattgatagtataggtgcaatagggattttaatactcttattacttttcattaaagtcgatgataatagtgattggatctataatggtggtttttaccttatttccggtatcactttatttgttatcattagtgtagtgcatccatcggggtatttcgctaaattaattggaaatcctttctttgtttatattggtaaacgctcttatagtttatatttatggcatttcccagtcataagctttttacattcctattatgttgaaggccaagtcccattatatgtatatgctctagacatcttattgactattttctttgctgaaatatcatatagattcattgaaacaccgtttagaaaacaaggattcaaggccttaagtattaataaatataaaaagtccgcattaatcagaactatactactaggcgtgatactgctaccaaccatttttatttttgcggggacatttgatcgtttaggaaaagaccaaattaataataaatcaacgtcatataatacagcagaaattgataagtatatggttagacccataccggtcgaccatgttaactttttaggagattcaaattttaaaaaagataaagataatgaggtatatactgatttgagtccactgcttattggtgattcggttatggttgatattggagaaacttttaaaacgcacgttcccaatgcaaccattgatggtaaagtcggacgtaatttatatgaagctataccattaacagatgaaaaatataaatcttacaattataagtctaagcaagtgattttagaattaggaacgaatggagatttttctgaagcacagctggacgaactgataggcaaatatggtaaagccaatgtgtatttgattaacacgcgtgtaccaaaaagctatgaaggtcatgtcaaccaagttatgtcagacgcagctaaaaagcatcataatgtaacattgattgattggtatcaacgttcgaaaggccatagcgagtactttgcaccagatggtattcatttagagccttcaggtgtaaaagcattaacagatgaaattttaaaacatattgcaacgaaatcaactgctaagtagcaaaattaaatatgaaattgagtcaatttaataaatttaattagagtgtgatttgcatgaaatagactgctaaaacacaataaaaggcataaccgcttaatgaacaagaggttatgccttttaatttattgagtgtcatgaatattcatatctaaggggtgtttatatatcatgtttaaaatgaacaaagtcattgtttagaatataaaaattatgggcaaaacataggtatataaggcattacacgcagctaaaataatttaaaatttatagtcatattggttgataaaagtgaacaataggattataataaaattaaggtcaaagaaagtcaaagtcaaacttactttgttcttgatcaaagactaaatggtgaggtgaatcattttggatattaatcaaatgacctatgcagttcaaggtgctttgcaaaaagcaatagagctagcaaaagataacgaaaatcaaaatatcgaaatagaagcaatattaaaagcagcacttgaagaaagtgaaagtttatttaaaagtgtattggaaagagcaaacatagagaccgaacttttaaataaggcttacgatgaaaaattgaaaaattatccttcagtacaaggggataacgtacaatatggtcaatatattagccagaaagcaaatgaattaataaataaagctgaaacgtatatgaatacttatgaagatgagtatatttctatggaacatatcattttagctgcaatggacatagatgatacaacaattaaatttgtcgataataaaaaagaagttattgtagaaatcattaaaaaaattagaggaggaaatcatgtgacgtcacaaaacccagaagcaaattatgaagctttagaaaaatatggtagagatttagttgaagaagtccgtcaaggtaatatggatcctgtcattggacgtgatgaagaaataagaaatactgtgagaatcttaagtagaaagactaagaataatccagtattaatcggtgaaccaggtgtaggtaaaacagcaattgttgaaggccttgcacaacgtattgtgcgtaaagacgtgcctgaatcacttttagataaaacaatatttgaattagatttaagtgcgcttgttgcaggtgcaaaatatcgtggtgaattcgaagaacgtttaaaagcagtacttaaagaagtgaaagactcagacggtagaattatattatttatagatgaaattcacatgcttgttggtgcaggtaaaacagaaggcgcgatggatgcaggtaatatgctaaaaccaatgcttgcacgtggcgaattacactgtatcggtgcaacaacactcaatgaatatagagaatatattgaaaaagactctgcattagagcgtcgtttccaaaaagtaaatgtgtctgagccagatgtagaagatacaatttccattttacgtggactgaaagaacgttatgaagtttatcatggtgtacgtattcaagataaagcattagtagctgcggcagaactatcagatcgttatattactgatcgcttcttaccggataaagcgattgatcttgtggaccaagcgtgtgcaacgattcgtactgaaatgggttcaaatccaacagagttagaccaagttaatcgtcgcgtcatgcaattagaaattgaagaaagcgcattgaaaaacgaatcagataacgcgagtaaacaacgcttacaagaattacaacaagaattgtctaatgaaaaagaaaaacaaaacgcaattcaatcacgcgtagaagaagaaaaaggcaaaattgcaaaactacaagaaaaacgtactgaattagacgaaagtagaaaagccttagaagatgcagaaaacaattataatttggaaaaagcggcagaattacaacatggtaaaattcctgaattagaaaaagaattacgcgagttagaagctgcattccaaaatgagcaaaatagtgacaatgagcgcattatacgtgagattgtatcagatgaagaaattggtgatattgttagttcatggacaggtatccctgtttctaaacttgtagaaacagaaagagagaagttattaaatctttcagacattttacacgaacgtgtcgttggtcaagataaagctgtagatttagtttctgatgctgttgtcagagcgcgcgctggcattaaagatccaaatagaccaataggtagtttcttgttcttaggacctacaggtgttggtaaaacagaattagccaaatccttagcgtcaactttatttgattcagaaaaacatatgatacgaattgatatgagtgagtacatggaaaaacattcagtttcccgtttaattggtgcacctccaggctatgtaggtcacgatgaaggtggacaattaactgaagcggttcgtcgtaatccatattctgttatattattagatgaaattgaaaaagcacattcagacgtatttaatgtattgttacaaatacttgaagaaggtagacttactgattctaaaggtcgtgaagttgattttaaaaatacaattatcattatgactagtaacattggctcacaaatcctattagaaaacgtaaaagatgctggtgtgattactgatgatacagaaaaagctgttatgaatagcttaaaccaatactttaaaccagaaattattaaccgtatggatgatattgtattatttaaaccattaacaatcagtgatatgagttctatagtagataaaatattaactgaattgaatattagattaatggcacaacgtatttcaattaatgtgtcagatgaagctaaagcgtggttaggtgaagaagcatacgaaccacaattcggtgcaagaccgttgaaacgttttgtgcaaagacaaatagaaacaccacttgcacgtaaaatgattagagaaaatttacctgaagacacaacaatagacatcgacctatcagaagatggtttaagatttactgaaaacaaaccagaaatcgattagtaagtataattgaatttaacaaaacggtgtggcgcagaaaccttaatttttacattggtttctgcgccacttttttaattataaaatcggggaacaagattgtaagttaatatatcatatctcaacaaaccaataagtttattttttaatattgaaaataaaaaaactgccaacgtcagtcagaagactttgttgacagtttaaagattctaggacataaatcaatgtttcaaactttacatttcattaaaatgagtcgttcttaaacataagctaaaccattatcctagtcatctaatgttgttcgtttgtattattatgtttaggtttaattaccaaatcaaacaagataataataatcgtaaatacaacagcgcccatgattggtgtaatgaggttcagtgcaccgccaccatttaagctgttaagtacgaaattaaccatttgtaataagacaatagaccaaaataaaactgcgaggtatttcattatgtaatgcctccaatatcgtatatatatctacattataaataataaagtgtagtttgtatagtaggttagtaataattgtggttatactttgtgataatgagctaagtcatttataattatttgtggaaaacacgcaatgaaatatgtatagttcttgtatttgaaatgtgtattatgttaaattaatacctggtattaaaattaaatttaagaaggtgtacaaccatggacgtgggtattaaaggttttggtgcatacgcacctgaaaaagttgtagaaaatacctattttgaatcatttttagaaacatcagacgaatggatttctcaaatgactggtattaaagaacgtagatgggctggtgaagacgaagaaacttcagacatggcttatcaagctagtttaaaagcaattgaagatgcaggtatagaagcatcagaaatagatatgattattgttgcgacatcaacaggggattttccattcccaacagttgcgaatatattacaagaaagattaggcatcggcaaagttgcttctatggatcaattagccgcttgtagtggtttcatgtattcaatgataaatgctaaacaatttgttcaatctggtgattataaaaatattttagtagttggagtggacaaattatctaaaatcacagattttacagaccgttcaacagccattttatttggtgatggagctggagctgtagtaatcggtgaagtatctgaaggtcgaggtatcttaagttatgaattaggttcagacggctcaggtgctaagcatttatatttaaatccagaaaacggaaaaatatttatgaatggccgtgaagtttttaaatttgctgtaagaattatgggtgaagcatctaacaacgcagtagcaaaagctaatttaactgcagatgatgtagatatgtttgtacctcatcaagcaaatataagaattatggagtcagcgagagaacgtttaggtataccaaaagaaaaaatgagtgtatctgttgatcgctttggtaatacttcagcagcgtcaatcccattaagtataggacaagagttagaaaatggtaggattaaagatgatgatgtcttagtgttagtaggttttggtggcggcttaacatggggcgctgtgacactaagatggggaaaataggaggataaattatgagcaaagaacaacgtgttgttattacaggaattggcgcattatcacctataggaaatgatgctaagtctacttgggacaatgcattaaaaggtgtaagtggtatagattcgattacacgcatagatacaacggattacaatgtccatttagctggagagttaaaagactttgatattgaagagcatattcctaaaaaagaagcgagacgcatggatcgctttacacaatatgcagttgtagctgcaagagaagccgttaatgatgctaaacttgaaattaatgatagtactgcggataaaattggcgtatggattggttcaggtattggtggtatggaaacatttgaaatttcacatagccaattattaaatcgtggaccaagacgtgtgagtccgttcttcgtacctatgctgatcccagatatggcgacaggtcaagtatcaatagatttaggtgctaaagggccgaatggttcgacggttactgcttgtgcaactggtacgaactcaataggtgaagcattcaagattattcaacgtggcgatgcagatgcaatgattactggtggtacagaagcaccgattacacatatggcattagctggctttagtgcgagtcgtgcattatctacaaatgatgataaagaaactgcatgtcgtcctttccaagaaggtcgtgatggatttatcatgggtgaaggtgcaggtattgtcgttttagaatcacttgaatcagcgaaagctcgtggtgcgcaaatttacgctgaagtcgtaggttatggatcaactggtgacgcatatcatataacagccccagctccagaaggtgaaggcggttcacgtgctatgcaagcggcaatagatgatgctggtattgaagcgaaagacattcaatatttaaatgcacatggaacaagcactccagtaggtgacttaactgaaattcaagctattaagaatactttcggtgaagcggcgaaatcattgaaagtaagttcaactaaatcaatgacaggtcatttactaggggctacaggtggattagaagctattttctctgcactttcaattagagatagtcgtattgcaccaacgattcatgctgattcaccagatcctgaatgcgatttagatatcgttccaaacaaagcagaagatttagatattacctatgcaatgagtaatagtttaggttttggtggacacaatgctgtacttgtattgaaaaaatttactgattaatgtagataagttatattttgaaaagcaagatcatctcaatcggatgatcttgctttttttgtaaatatcgaacttaagaaagttagagaaatgataacaataatagagaggcttatagtttattataataactttttaacggttgaatatttaaaattcttgtaaaacataaaatttatattgtgaaatgtttagaaaaagttaaaatataaagtgaagataattttatatttataaaatgtctattcaagacatacatttagtgtataatgtaaattattagattataaagtggggtgtaattaagatgaagcaatttctaacattatctacaacgttgaaaacaagaatgatagcagatttcatcttaattatagcgagccaagcgattttaccctttatggcattatatttaacgagtaaagtaaatgctgtatttgctggtacatttttaattgccaatatcattgtaagttttgtagtgtccttcgtaggtggatatttaggagacaattataataggaagaaagtagtcaatttaatacattttatctacgctgtgtgtctgattattttaagtattacggtgactatggatggtttaggtttaatcatattttgtataacggtatttatctttgaattattgtttgctgcgagtgaacctatttttgaagcagcaattatggatgccatttatgaagaagttcgcgagtacgtttatcaattaaattattggatgtttaatattggtacggcgattggcatggcattaggcgcgttgttatatttaggacataagcatttattatttgtattatttttcattgctatgctgataagttggtatttatttgaaaaatattatgacgtggagcaagttattactaaaaaagaagatctaacctctaaatttaaacatttcgtagatagttatcatgttgtcattaaggataaatactatatgttgcttaatattgggtttatgatggtcatcatggctgaactcagtttgaattcttatgtagttgtaagactaaaagaagcgtttgaacctttacattttttaggcttttatattgatggtgtccgaatgtttacagtaattatgatcatcaatacacttgtagtggcgacattaacttttacggttaatagaattgtagataacacctcaaagaaaattgtatttatgataggtattgttttatataccgttggttatagtgttttgatgtcagcttctgaattttggatattatgcttattttctattatagctacattaggtgaattgatttattccccaattcaaaatgcgcaacgtttcttgatgattcctgaagataaacgaagtacttataatacatttgggatgatttcattctatggagggaatatattggcacgtttaggattaataattggtgcgtttattctgccttggatgatgtcagtatatgtaggtgttatagtacttttaggatttatcctcttgtattacgcattatttcataaccctaatattgaaacaaaataatgaaaagactgtattcgtttattgtgaatcatcacaatagctgatacagtcttttttatataataaatgaaatggcaatcgaaataagtaaatatagcaaattaaaaacaaagcccactttaatccatggatttacaaagtaggatgattttttggcttgtgtaggtttaaaaaaatcatcattttctagcgtatctttgtgttttttattcgttagctgatactttagtcttctaaaaccgtaactcgtaggatctaatataccttcttggacaatgattaaactaaataggataatcacaaatataaaagatacatagaatatgatatttaaatactgagttaattgatgtgaggcaaagagccaacataagaatgaaatcaatggtgtaaataatagccaaaatagataagtggtaaatttcctcatatttattgtctcctttatttaataaatttattgtaacttaaaataactaaaaaatgaataatttgccttataaattcttttatatcaacacttttaaagagaaagaaaattaaataaaattcatttactttaataaagtaaagcaaaacaatattgattaaaatatgaactataagtatactgttattaaatatttctgaatatttcgaagggaatgtttattctgaaatcaaagggggataaaaaatgcttaagtatgttttgaagcgtttaggctacatgattttatcactgttcattattatttcgataacatttttcttaatgaagctgatgcccggttcaccatttaatgatgaaaaattaaatgaagagcaaaagcagattttaaatgaaaaatatggtctcaatgatccagtaccagtgcagtatgttagttatttgaagaatgtcgttacgggggactttggtaactcattccaatatgataaccaacctgtatgggagttaattaaaccgaggttagttccgtcgcttgagatggggttaacggcaatggtgataggtgtaattataggtttgatactaggcgttattgcagcagtacggcaaaatacttgggttgattatacagcaacggtcatctcagttattgcagtttcagtaccatcgttcgtgttagcggtattgttacaatacgtattttcagttagattacagtggtttccagtcgcaggttgggaaggtatatcgacagctgtactaccttcactggcattgtcagcagcagtattagcaacagttgcaagatacataagagcggaaatgatagaagttttaagttcagattatatcttgttagcacgtgcaaaagggaattcaacgatgagagtgttgtttggtcatgcattaagaaatgcattaatcccagtcatcacaattattgtaccgatgttagcaagtatattaacgggtacattgacaattgaaaatatattcggtgtgcctggtttaggggatcaatttgtacgttcaattacgacaaatgatttcccagtaattatggcgacaacgattttattcagtacactatttattgtttctattttccttgtagatattttatatggtgtgattgatccacgtattcgtgtacaaggaggtaaaaaataatggctgataaaagagatgaaaaatacaatgatgaccattcaaatgcagttatgacacatacctcagaagcgataccagcttcggattttattagaagtaaaaacgatttagaaaaagaaccagaaatgcaaagagaaagtaaaaacttttggcaagacgcttgggcacagcttaaaagaaacaagcttgccgtcgtagggatgataggtttaatcatcattatcttactagcattgattggacctttattaagttctcatgattatgcagagcaagatgtagagagacgtaacttacctgcaaaaattcctgtattggatcaaattccatttttaccttttgatggtgaaggagcacagggcgtagatgcatataaagaagcaggtgtgaaagaaaacttctggtttggtacagaccaacttggaagagatttatggtctagaacttggcaaggtgcacaagtatccttattcattggtgttgtagcagcgttactagatatattcataggcgttgtatatggggcaatatccggtttctttgggggacggatagataatgtcatgcaacgtattattgaagtagttgcgtctatacctacactaattgttgttattttattcgtactaatatttgaaccgtctatttggacaattatattagccatggcaattacaggatggattggcatgagtcgtgtggttcgtggtgaattcctaaagttaaaaaaccaagaatttgtattagcatctaaaactttgggagcatctaaaataaaattaatattcaaacatattttacctaatacattaggtgttatcgtagttacatctatgtttacagtacctaatgcaatattcttcgaggctttcttaagtttcattggtattggggtaccagcacctagaacatcattaggttctttagtgaatgaaggtagagccatgttattaattcatccgcatgaattatttattccagcacttgtattaagtttattaatcttattcttctatctatttagtgatggattacgtgatgcatttgatcctaaaatgcgtagataacaaaagggggcaacatatatgtcagaaagagtattggaagttagtaatttgcatgtttcctttgatatcgatgcaggggaagtgcaagcggtaagaggcgtggacttctttatcaataaaggagaaacccttgcaattgttggtgaatctggttctgggaagtcagttacaaccaaagcgatcactaagttattccaaggagacgctggacgtattaaaaaaggtgaaattaattttttaggggaagacttagctaaaaaatcagagcaagaattaatcaaattacgtggaaaagacatttcaatgattttccaagatccaatgacatcattaaatccaacaatgaaaattgggaaacaagtcatggaaccacttatgaaacataagaattacagtaaaacagaagctaaaaaaagagcgttagacatattgaatttagttgggttaccaaatgcagataaaagatttaatgcatatcctcatcaattttcaggcggacaacgtcaaagaattgttatcgcaaccgcgcttgcttgtgaacctaaagtgcttattgcagatgaaccaacaacagcgcttgatgtaacaatgcaagctcaaatattggaattaatgaaagaactacaagataagattagtacctccattatatttatcacgcatgacttaggggtcgttgcgaatattgctgaccgagtagcggtcatgtatggaggacaaatggtagaaacaggggatgtggatgaaatattttatgatcctaaacatccatatacatggggattattatcatctatgccagatttgacaactggtacagagactgaattattagctattccaggtacaccacccgacttgttacatccacctaaaggtgattcgtttgcagaaagaagtcaatttgctttagatattgattttaaaacgccaccgccatggtaccaagtgtcaccaacacattttgcaaaatcttggttattagatgaacgcgcaccacatgtggaaccaccggaaatggtgaaaaaacgtttgcgtaacatgccaaataatttcgataagccacaacaggtagaaagggtgtcgttagatggaaaataaaaatgaactgttattacaagtgaaaaatttaaaacagtattttaacgaaggtaaacgcaatgaagtaagagcaattgaaaatatttcatttgacgtttataaaggtgaaactttcggcctagttggagaatctggttgtggtaaatcaacgacaggtaaagcgattattaaactaaatgatattactgatggtgaaattttatatgaaggtatagatattcaaaaaattaaaaatcgtaaagattcattgaaatttaataaaaagatacaaatgatttttcaagatccatacgcatcgctcaatccaagacttaaagtaatggatattgtggcagaggggattgatattcataaactttctacaggtgtcaaagatcgtaaaagacgtgtctacgatttattagaaactgtgggactaagtaaagaacacgccaatcgttatccacatgagttctctggaggacaaagacaacgtattggaattgcacgtgcacttgccgttgaacctgagtttattattgcggatgaacctatttcagcattagacgtttcaatacaagcacaagttgtaaatttattacttaaattgcaaaaagaacgaggcattacgtttttattcatcgctcatgacctttccatggttaaatacatttcggacagaattgcagtgatgcactttggtaaaattgtcgaaattggtagtgcggatgaaatttataatcatcctatgcacccttatacgcaatcactactgtcggctgtacctcagccagacccagaaagtgaacgtgtgagaaagagaacactttttaaagaagacgagactaaaaatgaccaacgtacattgcatgaaatcagaccgaatcattttgtatttacaacagatgacgaagcggaagatttgaaatcacatacacaagaagcatctgtataacatgggaaagggggattacgatgagaaaattcaaattatttattattctgattgcactatcggttgtattagctggttgtggtagtgcggaaggggtatattctgataaaggacaagtttttaggaaagtactgccatcagatatttcaacattagattctgcattagctacagatacggtgtcattcgatattttcaatcaaatatacgaaggcttatatacattagataaagatgataaagcacaaccaggggtagcaaaagcaatgccaaaagaaagtaatgggggaaaaacacttacaatcaagttacgtaaagatgccaagtggtcaaatggggatccagtaaccgcacatgattttgagtacgcttggaaacgtgtggtgaatccagatacggcatctgagtatgcttatatcatgtatgatttgaaaaatgctgaagcaattaatatgggtaaaaaggatgtcgatgagctaggtgtgaaagcggttgatgaccatacattaaaagttgagttaacaaaaccgattccatatattaatgaaatgttcgcatttggtacgtttatgccactgaacgaaaaagtagtgaagaaaaatggtgaccaatatgggacaacagcagcaaaaacagtatttaatgggccgttcaaagtgaaagaatggaaagtagaagataagatacaacttgtaaaaaacgaagattattgggataaaaagcaagtacacttagatcgtgtaaactataaagtattaaaagatcagcaagctggtgcctcactttatgatactggttcagttgatgatacgacgattacagcagatcaagtggataaatatgctgacaacccaggcttgaaaaaacgtttattagcaagtacattctacattaaaatgaaccaagataatgtacctgaatttaaaaataaagacttaagactggcaattgcacaatctattgataaagaaggatatgttaattcagttaaaaacaatgggtcagaagcaacaaatggtttcactgcgaaactaacagcagagacacctgatgctaaagatttttctgagtctattgattcgccattaacttataatccaaaagcagctaaaaaacattttgaaaaagctaaaaaggatttaggcgttaaaaatataacctttacgatgaacactgaagatacaccagatgctaaaatatctgctgaatatattaaatcacaggtggaaagcactttacctggtgttactttgaaaattaaacaattaccatttaaacagcgtttaaatcaagaatcaacagaagcgtttgaagcttcattatctggttggggtcctgattatcctgatccactaacattcttaaatattatgacaacaggtaactctaataataatacagcatggagtagtaaggaatacgataaacttgttaaagatgctaacggaaaactattgaaaaaacctgaagaacgtaatgcagctatgaaacaagctgaagaattaatgttaaatgatgccccagttgcaccaatttatcaaaaaggggaagcgcatttaacaaatccacaagttaaaggtttggtatatcatcaaatcggtggtgatacaacacttaaagatgtaaccattgataaagatatcgatcctaaaactggtaaaaagaaagactaataaaaaattaaaaagtaacataaaaggagcatccaacttaatggatgctcctttttaacttgtgggatttgagataagtaacttatcttttacgacctaagcccattgctttttccatttttttcaacgttttaaatgatacttgttgtgctttgtctctaccattatctaaaatagtgtcaagttcttctgaatttaaatagtattcatatttttcttggaaagcagttaagaaatcactcacgatttctgctaagtctgctttaaacacaccataattcgaatctttgtatttttcttgaagcgcatcaattgattcgtcagttaaacttgaataaatagataataaattagagatacctggtttattgtcgcgatcgaatttaataataccatctgaatcagttacagcactttttatttttttagccgcaacgcttggttggtctagtaaagaaatgaagtttttttgattatcatcactcttactcatttttttcgttggatcttggagactcattacgcggccgccaactttaggcatacgaatctcaggcttaactaaaatgtcgttgtagcgagaattaaatctatcaactaagtttcttgttaattccatgtgttgcttttggtcatcaccaacgggcacgatatttgtgttgtatataacgatatccgctgccattaaaggaggatatgttaataagccggcagggacaccttccgtttgtttaacggctttatctttaaactgagtcatacgttccaattcaccgatagaagaaatggttgttaacatccaacttgcctgaacatgcgctggcacttctgattgaataaataaagttgatttttctggatcgatgccagaagctaaataaattgcagctagttgtcttgtttgtttacgtaatttcaaacgatcttgtggtaccgtaattgcatgctgatctacgatacaaaagaaacaattgtaatcgtcttgaacttcaccgaattgttttaaagcaccaatataattaccaattgtaggaataccactaggctggatacccgaaaataatgtttccatattacaatgcctactttcttaaatttaattttttacataataggtttattataacagtatttcaatcatttgtaagttatgttagactatagacatatcaatatttttaattgaatttattgagaaatacttttaatttaaaatttttgaaaaaattagagaattctcatttaattttaatgttgaaagggtatactttcattgtaaggttaaggaaggcgaaattacttaagcaatttcttaatcaaataaatattgaaatcaaatgaatttacattcatgaaaaataggagagtgagatgtatggtaacattatttacttcaccaagttgcacatcttgccgtaaagcgaaagcatggttacaagaacatgacattccgtatacggagcgtaacattttttcagaacacttaacaatcgacgaaatcaaacaaattttaaaaatgactgaagatggtacagatgaaattatatctacacgttctaaaacttaccaaaaattaaatgtggatatcgacgcattaccacttcaagatttatattcaattattcaagataatcctggtttattacgtcgcccaattattttagacgaaaaacgtttacaagttggttataatgaagacgaaattagacgtttcttaccaagaaaagttcgtacgttccaattgcaagaagcacaacgtatggttgactaattaatacattaaatacatgaactagacgagccataaagcaatatttaagcatgttgctttgtggttttgttatatttttaacataacaaacaattaggtatgcacgtcaaatgataaggtgatatcatcttattgttatgaggtggctagctatttgtgaataagtaatgacatgattgcaacagcactttcttagtttagtgctgtttttttggctaattcaaaggtatatgttaatattagagaccaaataggatttagtaaaaattaatcaaacaaatcaattgtaattcttactacgttctaatacaatatgattactattcatcgactgtaaggagtgagatgatatgagaatagagcgcgttgacgatacaactgttaaattatttataacttatagtgatattgaggctagaggatttaaacgagaagatttatggacaaaccgcaaacgtggagaagaattcttttggaatatgatggaagaaatcaatgaagaagaagactttgtagtagaaggcccattatggatacaagtgcatgcgtttgaaaaaggcgttgaagttacgatatctaaatctaaaaatgaagatcttattaatatgtcagatgaagacaatgaacaacttgattatcaggtaaatgatttattgtcacaaacatttgatcaagatgatagtttagaagatttatttgatcaacgtcaacaacaaaaagataacaagcaaaatcaagatcaaaatgagcgcaatcgtcaaaatacacgtactgtgattgttaaattcaatgatttagaagaagttattgaatatgcacactataataatcaagtgacagatgagttcgaagatttattatatagtcttaacaatgtatattattatgctgtccattatgatgaaacagtagatcaagaaacaattaatgatagttatagtcaattacttgagttcgcatatcctactgataaatcagaagtgtatttaaacgactatgccaaaattatcatgagtcataatgttgcatcacaagtacgtcgttatttcccaaacacagaagcataaaatacaagtcaaaattgacgtatttaatttataaaagcacgttagataacaaatgcattataagatgttgaaaccagctatgggtcattacccttagctggtttttttatagagcaattgcgtttttaaataaataggcaatattttaactagtagtagaagtaatttattgattaataaggtgtaattattatgaggtgaagaaacgtgttgttagcgtatgaccatcataagcatttagtttttgcaaaccatgctgttaaagatgccgaatatacatgtccacattgtaaaagtaaaatgattttaaaaaaaggtgaaataatcacaccacattttgctcatttaaaagtagcttctattttttgtagtaaaggtgaaactcaggcacattactcacttaaatatcagcttgcactgaaattgtcatgtatcggttatcatgtacaaatcgagccttatattgctgggatttatcaatatcctgatttaattattgataaaaagatcgccatagaaatacaattttcaaaaatcacaatttctagtgtgaaaaaacgtagtaacggtttgttacatattggttatagattaatatggattattccaaacccatattacgataaacttaggcatattttaatattaacgaagtacgaaagaacttttatagattttaaatctaaacgcttgctcacttgggacagtagtaacaagcagttatatatgtatcaaatttataattttattggtggcaatcgctatattgcacataaatttaaactggagattaaagattttgaatatgtgtttagtcaaattgaaactgaagattttacgcgtgatatcaaattaaacaaaaatacgattcagcaatatataaatcgttgtcgatgtacacgctctgttaaagaaccaagtttaagcgttatgtataatttaggtctatctgataattgggtaagtacgtatttaggaatcatatatccagaacaattatacattcaatcccatcctatttattggcaattgcaattattatatttacttgttaaaacaccgcaaaatttaaacgaatttaatgaaaaaataatgcttaatcacttttataacatagaaaatacaaaggatgtcatagttaatgagcttataaataaattcagaaattcttacagtaaaatggaatacaataacgtgcaaaattaggccggacgtgagaaaattaaagtattgaaaaacataggaggtttactaaaaatgacacaacaattaacaagagaagaacaagaacgtaaatatcctgaatatacatgggatttaacaactatatttgaatcagatgaagcttttgaacaagctttcaaagaggttgaggataacctcggtcaagagcaacaatttcaaggacatttaggagataatgctgaaactttatataaagcgttagcattagaagatgaactaggttcaaaattagaaaaagtatatgtatatgcacatttaaaacaagaccaagacactgcaaatgataaatatacaggatacgaatcacgtgcacatcaattaattataaaatttagttcaggttggagtttcttagtacctgaaatcttacaaatagatgaagaaacaattcaatcattcattgaagaaaatgatgatttaaaacaatatgcatttgatttgaaattaattaatgaaaaacgtcctcatgtattaactgcagataaagaaaagttactaacagaagcgcaagatgcattatcaacaccagataatgtatatggtatgtttagtaacgctgatttagagtttgaagacgctgtcgataaggatggtaatacgcattcactcactcaaggtacatttattaaatgtttagaatcagatgatcgcgtgttacgtaaatctgcattcgaaaacttatacaaagcatacggcgcatacaataatacgctaagtgctacattggctggagaagttaaaaagaatgtatttaatgcaagaacacatcattatgaatcggcaagagcagcggcgttaagtaataaccatataccagagacagtatatgataatttggtgaaaacagtccatgaatacttaccattgttacatcgctataccaaattacgtaaagagttattaggtttagatgatatgaaaatgtatgatctttatacaccattagttaaagatgtgaaatttgaaatgccatatgaggaagcaaaagactggatggtaaaagcgttgcaaccaatgggtgaagaatatatgaaagtagtacatgaaggcttaaacaatcgctgggttgatgtgtttgaaaacaaaggcaaacgttcaggcggttattcttcaggtgcgcacttaaccaacccatttattctcttaaattggtcgaatacagtttctgatttatatactttagtgcatgaatttggacattcagcgcatagttattttagtcgtcaaaatcagccttctaattcaagtgattatacgatttttgttgctgaagttgcgtctacttgtaatgaagctttattaagtgactatatggataagcatttagacgatgaaagaagactattgttactaaatcaagagttagaacgtttccgtgctacattatttagacaaacaatgtttgcagaatttgaacataaaattcaccaaattgaagaggcgggtgagccgttaacagctaatcgtatgaacgaagagtatgcagaattaaacagattatactttggcgattcagttgaaactgatgaagatattagtaaagaatggtctagaattcctcatttctatatgaactattatgtgtatcaatatgcaaccggatacagtgcagcacaaagtttaagtcatcaaatattaactgaaggacaacctgctgttgatcgttatattaatgaattcctgaaaaaaggtagttcaaattatcctatagaaatattgaaaaatgctggggtagatatgacaacaccagaaccaattgaacaagcttgtaaagtctttgaacaaaaattagacgcttttgaaaagctaatgaaagcttaatgtgaatgtattcgtttacaatatgacaagtttgtgacaaactaaaattatttaattcaaatggttgaaaggtctattttagcgtgttatattataaacatgaaattaatcacataacaaacatacccctttgtttgaagtgaaaaatttctcccatcccctttgtttagcgccgtgtaatcagacacggcgtttttttatgctctcttttaaataaatttccaaaatgcgtttaaatgaataactattcaattgactttattccgaaaaagcgttatcctaaacttgtatctaaaataaatacaagaaagaagtgttttcatgaaaattgcagtagtagcagcaaatgggaaagccggtcaacttattactaaggaagcggtagaaagatcgctagatgttacagcaattgttagaagtgagaataaaacagttgcgcatcaagtcatacaaaaagatttgtttgatttgactaaagaagatattgcaccttttgatgtcattgttgatgcatttggacaaatgaataaagataagttgaatgagcacagtcaatcgctagaacatcttagtaatttggttagtgacagtcaaaaacgactcattattataggtggcgcaggtagtttatacgtagataaagcacatacagaaagattgattgattctcctgatatgccagaagaagtaaaacctattagcatggcgcaagtcaaaacatttgaagaaattaaagagcgtgatgatgtgcaatggacttttgtgtgtccagcaccagattttcaatttgatggtgagaaaacaggcgcttataaagtgagtgatgatgaagtaataggtacacatgtaagttatgcagattttgctaaagcaattgtagatgaggcaatgaaccctgaacatattcaaagtcgctttgcggtatttgcaaagtaattttcaaaaaacaaaaaagtagtaagtcattcataataaagcactatcataaattggactggtgagcaaaagcgcactagtccattttttatgaacatactaagtagtgcaaatatctctgcaattaaaaagatgtcatcgtaataaaggaaaatagtttgactatgaatagcttaataactaaatatttgtaagattaaaggacaaaatataagaattcacgttttgtttacattaatataattttctaatgtattaagtaatctttttactatagtgtcatcaggacaatttcaagttcttatttatgaatagcgtgaaaatcaagtgcattttaaattgtatgtattaatcgtttctacacgaaatcttcacgtgctgatatacagagaaattgtatgagttaaggactatggcttggtctatatctctagagtagcaagtacaatctaaatggtgtaatgaatataaaaaaagagggctaatccatttacatagtgattagtcctctttatttgaacatgggactgtatgtcccaacttcatgtttttgaaattaatacatttatactatatcgtacgtgttaaaaagattaattttttgctttccagaatttgccatctggtgatttaagtttttcaattttttgctgtagtgctagctttttaagttctttattcattagtttttccggccattcataaatcgtaagtagctcttctttggtaaccaattgttgttgttggatatagtcttctaaacttggtggtaattctttttctattgttgaaccaataagctcattaataatatatgtgtatatatggtaaggatataagccttccacttttaagccttcttcgtgaacatcttcattaaaaaatacgagagagggcgcttcctcaatttccatttctcgagcaatatgcaagtctacttgtaaactttcttttaagcaagaactatttaaatcttctttaaatacttcgtaatctaaacctgcgttactgatacaactatttaccattgattcagtaataatatcacgcttaggaataatttcattttgaacgagatgtataaatcgttcagcacgaatacgtccttgaagttccgcagccttataggctaatgcgatattatctaaatcagaggtgctctgagcttggcattttgttaaaacacgtaatgaagggttcaatatatgtctaatactaatatattgcttatattcaatacgtaatttagaaaggatagccgatagcttaaagcattccttactgaatggatcgaaaaaggaataaatttctatcttgctcacaggtgaaagatttgcatcttcacgactattaggttgtattaatcttaattcttcagtcatgtctattccacctacaattaattttcggaattaaccatgtgatttgccgttaaacgtaatcgttcatataagtaatcaccaacaccagctggaaattgtgcatgcgcgattgcatgtgccatattttcaagccacgcatctcgttcgtgatttgtgattatgaaatccatatgccgtttttttagcattgggtgaccatgttcctgtgtataaaggtttggaccacctaaaaattgcgtcaagaattgcttttgttttctactcgtttcttcaaaatccccaggaaacaaatggttaattctatcgtcgcgtttaactaaataataaaaatgatcaatcatcttgtataaggcgtcatgtccaatgatttcataaggtgtttgagtcataatatcaccgtatcctgttaatatattactaatataacatgaatttttacatttggaagtaattcgacttcttgctattgtgcttgattaattgccaaataaatttgatttacgtttaaaaaatctttggactttattatctggtatttcatgttgcatattaaattgttcaagaatatttttaaattgtttgaacccttcatcgtaatcatcaacttcaaattctagttcaaaatcttcgaaatcaagatagcgacttttatctaatacaagtaaattcccattaacttctttttcgagtcgttctgtcgttaatgcgccaagaataactaattgatttaagtcaaagtccattttttcaagttgttctatgatttcagcaggcaacatttgtgtcgtgattgatttgtttaattcaggcacgacccgagtttcaaaattatattccatcagaccaacttcagcaggtatttttaaagtcatctcattataatcatctttcacacgaattcttaaggctgactggtgtgccttcaagtcaaattgtggtgtatcaatatagtagttggtttgactaaaggtaccgacatcctgaaaataggttttataaatggattggtattgtgattgggttaataattgtttaaattcaatttcattattcgtagccatgcatacactccttttttacatataataacttattttaaatcactttttccttattttaaattgaactgcatttgtaaaatttgaattaagtaaaagttatgtatatatgttggtaaaacatgtaagttgtgacgtgttatgtacgaaagaattatgttaaaatgatgaggaataaggaggaacaagcatgcgtatttatgtaaatgaaattaaagttacagaagacagtataaattgttatacagagcaatctacagaaggcttacaagaagcaggacaaatgcttgttgatagcgataattatagttttgcatatattttagacgatggacaatcatattcttatttaatatttgtccaagaaacttggtctatgttacatgaaaataaaggcaagaaattgattattaatgatgaactagaattaaaacaattcgaaaatgaatttaactatatattggataacatacaaggtaattcaaattatggtaaggagtttgtgtccgttgttgaaaatactttcgaattagattgaagcggagtgaagcacaatgaatcagtggggtcagtttttatctccatataagcaagcagtcgacgaactgaagattaaattaaaagggcttagaaaacaatatgaagtagaagataatgcttctcctatagaatttgtaacgggccgtgtgaaaccaatgacgagtattattgataaggcaaataagcgccaaatatcatttgatcgtttacatgaagaaatgtacgatatcgctggtttacgtttaatgtgtcaatttgttgatgatatagatatcgtggttaatttattgagacaacgtaaagactttaaagttgtcgaagaaagagattatattagtaatacgaaacaaagtggttatcgttcattccatgtgattattgaatatcctatagaaacacttaatggagaaaagagcattttagcagaaattcaaatcagaacgttagcgatgaatttttgggcaacgatagaacatacactgagatataaatatgatggagactatccacctgagattcaacatcgtttagagcgagcggcagaagcagctttcttattagacgaagaaatgtctgaaataaaagaagaaattcaagaagcacagaaatattattctaaaaagcgtgcgaaaaagcataataatgactaggggatgttacgatgcgttacacgatattatctaaaggtgattcaaaatcaaatgctttaaaacataagatgattaaccatatgaaagattttcaaatggttgaagacccagataatccagagattgtcatttctgtagggggagatggcacattgttacaagcgtttcaccagtatagttacatgctttctcgttgtgcatttgttgggattcatacaggacatttaggtttttatgctgattggctaccacatgaagtggaaaagttaattattgaaattaataattccgaatttcaagtcattgagtatcccttattagaaatcatcgttcgttataatgataatggttatgaaactcgccatttagctttaaatgaggctactatgaaaacggaaaatggttctacgcttgttgtggatgtaaatataaggggtaaccagtttgagcgttttagaggtgatggtttgtgtatatccacaccatcaggttcaactgcttataacaaagcgttaggtggggcattgatacatccttcattagaagcaatgcaaattgcagaaatcgcatcgattaataatagagtctttagaacggtaggttctcccttagtcttacctaaacatcatacgtgtttgataacaccagttaatcaggacacaattttaactaccattgatcatgtgagtattaaacataagaatgtgaatgcaatacaatatagagtagccaatgagaagatacgatttgctcgatttagaccatttcctttttggaaaagagttcatgattcatttatttccagtggagacgatgaataatgaagtttacttttaatattactgcttcagaaatgttacgttcttttttacaacgacatcatttctctaagcgaacgataagcgccattaaacataatggcgctttagtagttaatggtcaaactgttacggttagaaaacaattggctattggtgatattttggaagtataccttggtaaagaaatcccaagtacaaatcttaaaccttatcaacaaccattaaatattttattcgaagatgactatttaattgttgtatcaaaaccaccgtatcagaactgcgcaccttcaagagaccatttgcattatagtatagtagaacaagtattaggctatttaaatgaaaaacagcctggcatcaatccccatatagtgacacgactagatcgtaatacctctggaattgttatattggctaaacatgggtttattcatcatttaatgtctaaccttaatatagataaaaaatatctttgtatctgttatggtaagactgaaaaagaaggcgtgatagatgcgcccattgcaagacacccagaaagtattattcaacgtcgtgtcgatgcagctggaaaaacagcgcaaacacggtttaagcgagtggaatataaggaaggatttagtatgtgtgaagtaacattactaactggaagaacacatcaaatacgtgtgcactttcagcatatcggtcattctatcgtaggcgatgcgctttatggtggcaagcatgaaagctatcatcatcaactattgagatgtacccaggtggcattcatacatcctataaaaaatcaaaatattgtaattaatgataaatatgatgcaatagaaacgctatttaatatgatataattttaaacatacatggaggtgtacgaatggctaatgagaaagattcaatcgttttagaggatgaacaagtttatgaccaaacattattagacaatttgttgttaaataatcatatagatgaatttagagatgaattcttatccatgcatacatatgaacaaagtgaatactttgaggatagcaatgaagatatacgccaacgtatgtatgaagtactatcgccagaagaagtagcggatttctttgaacaattagaaattgatgaagatgaatacgaatcactttttgatgcgatgaatgctaattatgcaagcaaggtactagaagaaatgtcttacgataatgcagttgacattatgaaccagctatctaagcaaaaaatagttagtctcctcacgttaatgaatagagaagatgcaaaagaaataaaagcattattacattatgatgaagatactgccggcggtattatgacaactgaatatatttctttaaaggcaaccatgccagtaaaagaagcgctcatgcatgtcaaagaacaagcgccagacgctgagacaatttatgttatttttgcagttaatgataacaaacaattggctggggtactctctcttagagatttaattattgctgaaaatgatgcatacatagaagacataatgagtgaacgtgtcattagtgcaaatgctgcagatgaccaagaagatgtagctcaaaagatgagagactatgattttattgcaatgccagttgtcgattatcaagatcatttgctaggtattataacaatcgatgatatcttggatgttatggacgaagaagccagtgaagactactctcgtttggctggtgtatcagacgtagatgcaacaaatgattcagtgtttacgacagctaaaaagagattgccatggttaattattttaacatttttagggatgattacagcaacaatattaggttcatttgaagatactttatcaaaagtagcattattagcagcatttattcctattatcagcgggatgtccgggaactctgggacacaatcactcgccgtatccgtacgtaatatttctactggtgaaatatatgaacaaagtaaatttaaagtcgctttaagagaagcgggtagtggatttttaagtggtcttgtatgtgctttgttactatttattattataatggtgctgtacggacaagcaatactagctatcattgttggtggaagtttgacgattgcaatgacggtaggtactttagtgggatccatgattcccttagtaatgaataaattgaaaattgatccagcggttgctagcggaccatttatcacaacaatcaatgatattgtcagtatgctaatttattttggattagctacatcatttatgtcttatttaacttaagggggttatatggaatttttatcgcttgttgtcgtagtgttagcggcattttttacaccaatattagtcaatcgactcagaatcacatttttacctatagtggtagctgaaattttaatgggcattgtcattgggcactcatttttaaatttagtagaacgagatgcaatgctcaatatattatcaactttaggatttattttcttgatgttcttaagtggtttggaaatagattttaaagcttttaaaagagataaaagttcagcgaataaagaacaaaaattgaagaaacaagaacctggccatttacaattagcagttgttgttttcatgtttattatgattatttctattattttcgcatatatgtttaagtggtttggacttattgatgatgtcttactaatggttattattatttctacgatctcattaggcgtagtcgtgccgacacttaaagaaatgaatattatgcgtacgacgataggtcagtttatcttattagtagctgtacttgcagacttagttacaatgattctattaacagcttatggtacattacatgcttcgggtaatacatcgttatggctaattggtagtttagtcgtctttaccattattttctatttgttaggcggcattttcaaaaaagcacaatttttacagaaattaatggatggtacgactcaaatcggtatacgtgcagtatttgccctgattattttgttagttgctttagctgaaggggttggggcagaaaatattttaggtgcatttttagcaggtgtggttgtctcattacttggtccagatgaagatatggttgaaaagctagactcttttggctatggcttttttattccaatctttttcataatggtcggcgtagatttgaatattccacaactcattaaagaaccagcattattattaattattccatttttaattttggcatttttaatttctaaattaattccattgttttacatacgaaaatggtttgatatgaaaacaacgatttcttccgcatttttactaacatcaactttatcgttagttattgcttctgcaaaaatagcagaacaattaggtacaatttcaccagaaatttcaggtattttgatattaagtgcagtgattacatgtgtatttgtacctattgtatttaaaaaaatgtttcctatgcctgatgaggccactagacaaattgaagttagtttgattgggaaaaatcaattaacgattccaattgcccaaaatttatcatcacaactttatcaagtatcgctttattatagaaatgatttaagtgataaacgtaaattgtctgatgccatttcaatgattgaaatttcggattacgaagaagagttgttagaacgtctaggactattcgaaagaaatatcgtagtatgttctacaaatgatgatgaaattaaccgtaaagtagcattgatggctaaggcgcatggtgtgaaacgtgttatctgtcgattggagtctagttcgtcagatgaaacgttacaaaaagcgggtattgaaatcttcagtagttatatgagtaacaaaattttgttaaaaggtcttattgaaacaccaaatatgcttaatcttttaagtaatgttgaaacatcattatatgaaattgcgatgttaaatcatcaatatgatcaaatccaattacgtaatttcccatttggtggagatattatctttgtacgaattattagaaataatgaatctatcgtgccacatggtgatacacaattacgttacagagatagagtaatcgttactggttcaaaagaatatgtagacgaattaaaacgcgaattagaattctattattaagttagtgaaaaatagagtgaaggacattgcatggtatgcaatgtcgtttgctttatttttatgttttcttttgtacgaaagcgcgttatattgacaaatttggaagtgaaaacgtattaaatttatgagtatagtaaaataaattgtttattcaatcaaaccaatgttaaaatagggaatggttatattggcatagagcaaagtgatcgttcgtagcttcataactactcgaaccaattaaaatggaaatttaaataaaggagttatattcatgttaaatttagagaataaaacattcgtcattatgggtattgcgaacaaacgtagtatcggttttggtgtagctaaagtattggaccaacttggtgcaaaattagtatttacataccgtaaggatcgcagtaaaaatgaattagaaaaattagttgaacaattaaaccaatcagaacatcatatgtatcaaattgatgttcaacaagatgaagatgtcattaatggttttgctaaaattgatgaagatatcggacatattgatggcgtataccactcaattgcttttgcaaatatggaagatttacgtggtcgctttagtgatacatcacgtgatggtttcttattagcgcaagatattagttcttattctttaacacttgtagcgcgtgaagcaaaaaaattaatgcctgagggtggtagcattgtagctacaacatatctaggcggagaatttgcagtacaaaactacaatgtgatgggtgttgctaaagcaagtttagaagcaaatgtacgttatttagctttagacttaggtgaagataacattcgtgttaatgcgatatcagctggtcctatccgtacattaagtgcgaaaggtgttggcggccttaacactatcttaaaagagattgcagaacgtgcgcctctaaaacgtaacattgatcaagaagaagtaggtaagacagcggcatacttgttaagtgatttttcaagtggtgtaacgggtgaaaatatccatgtagatagtggttaccatatcgctaaataaagaaacacaaaatacgcatgaccatcgttacaattcaacgatggtcatgcgtatttttatataaatgagaccgagacatagattgttgtctcggtctcaaactttattttcaaaaaaggaagatgaggtcattttatataaccatgagttcatcttcccacttatttttgaatgattattcttttacatcactattcgctttttccataatcttttctcgataatggaatacattacgaacaattgttttaatgactgcatataatggaacggcaactaggatgagtacgaaaccacctaaattaccagcagcaagaataacaacaataatcgttagtgggtgaatatttaatgatttacccataacgtttggtgtgatgacattaccttctaattgttgagcaattagtgtaatgatacatacccaaatgaaaattgtaggactttggataataccaataatacctgctggtgcaaatgccatccaaggacctaagaacggtatcatattggcaacacatgcaaacataacaagtaataatgtgtaatttaaacctacaatagaatagcctatatataaaatgatacctaagataatacttactgtcacttgaccttgaatataagattttaaagtatcatttaaatcttttaataaatcaacaataaatacttttctttcgcctttaaataatttagcgataaatggaataaaacgttcgtgatcttttaacatatagattaagaagaatggcaccatgatgagtaagaataaagttgaaataaatgaagtcaagtaacttaatgagttagataaaacatttgcagtactatcactcatagattgaaccattttattaattctatctgtgacatcattaggtagtctttccatttggtctaatgaaaagttaatgatgtgttgaacttcgtgctgtaatgctggaatttgattaattaaattttcaatttgctcggcaatcagtggtccaatataaccaatgacaacaccaatgatgataattaagccaatgaaaattaaagtgatacttccccaacgagggattttatttttttcaagtattttttgaaaaggtaagcaaatatagaataagaagccacttaataatagtggtaacaacaccgattgtaaaataataataaatggcgtgaacacactatggacttccattactaatttgattagtaaaaacaggattaatagtgcaatacctgttctaaaccaaaccttatttagcatagaacggttcctcctaatattcattatttaagtacaattcagtatatcttaaatgaagacataacaaaagatgaaattaaaattattgaagccaatagagtatattgtgacaaataaagaaatctaaaaacgatatacgcatgacgtcatattaaatagtgtgaaattattttcctttgatataaagtcattgtaaatattttatattaattataacttgaaatatataaattgtgaaaatgattacttatgaaatacgttgcacggaatattttataagtgtataatgataaaaaatatatcattttacataatggtactacaagggggatacattatgttagaggggttacttacttggttttatgatattgtttggagcaaaccgttagtttatgggttactgattacaggtgtacttttttcattaatgatgcgctttttccaagttaggcattttaaagagatgatcagattaatgtttcaaggggaaaaatcacccacggggatatcgagtttccaagccattgcactgtcactcgctggccgtgtcggtactggtaacatagtgggtgtatcaactgcaatctttattggtggaccaggtgctgtattttggatgtgggcaacggctttcttaggggcaagtagtgcatttatagaatcaacactaggtcaaatatataagcgagaagaaaagggacaataccgtggtggaccagcattctatattgaatatgggattaagggcaaattaggaaaagtctatggcttaatttttgctattgtcacagtcatttctgtaggactcctattaccaggtgttcagtctaatgcgattgccagctctatgaaaaatgcatttagattggaaccatggattattgcaatatttttagcggtgcttttagccttaattatttttggaggtattaaatggatagcgaatgcagcaaccgctattgttccatttatggcaattgcatatattataatggctgttatcattatattcttgaatattgaacaagttccaggattgattgcacttattttcaaatctgcttttggtatgcaagcggcttttggtggtatcttaggtgccatgattgaaatcggtgttaaacgtggattgtattctaatgaggctggacaaggaactggaccacatgcagcttcagcagcagaggtgtcacacccagctaagcaagggttagttcaagcgttttctgtctatgtagatacattgtttgtatgttcggcaacggctttaattatattactttcaggtacatataatgtgacagatggagggacaacctcaagtggtaaaccaagtatgattaaagataatggcatttttgtagaaatgtcaaatggtgataaagattattcgggtacagcgatgtatgcacaagctggtattgataaggcccttcaaggtggtagttatcattttgatcctgcattttcaggcattggctcatactttattgcatttgcgttattcttctttgcatttacaacgatattagcgtattactatattgcagaaaccaatattacttatttgactcggaagggaacaggaaggacaacattcttctggattaatgtcacgagagtcgtattaattgctgccacagtatatggtgcagtgaagacggcggatatcgcttggatgatgggtgatttgggagttggtatgatggcttggttgaatatcatagctatttggatattgcacaaaccagctattcaagcattgaaagattatgaattacagaaaaaacaactaggttctggtaaaaaagcaatttacaaaccagaccccaaaaaagtaccaaatgccgtcttttggctaaaagactatccacaacggttggccaaacaaaaaatagatgagtcatagaggtatttacaccataaataataagatttcaacattttaaaataatgcgtctcttggtacaatgtcattaagactacgagggggcgcattatttatgtatgattttaaaccaggatgtatcactaaaattaattttcctagtaaaatattagatagagatgtcacactatctatttatttaccaaaagattttaccgaattatttaaatataaaatcatattttgttttgatggtgctgattttttcagttttggtagaattcatcgaacttatgagcagttacgagaggccaatgaggtagaaagagctatatttgttggatttcactatgaagatgttgataaacggcgcgcagaatttcatccacagggtgcacgtacacatttaactgtaaaagcaatggccaatgaaatattgccatatattgatcaaacatttcctacatttaaagtaggtaacgcacgcattttattaggtgatagtttagcgggtagtgctgcgttaattacggcgttatcttatccgcgtatcttcagtcaagttggtttattaagtccacaacatgatgaagcgattgaaatgttaattgaacgttgtcagtttaaagaacaattatccatttggcatgctgtaggattagaggaagaagactttaaattgccaacaacaggcaaatctgcagactttttaacacctaatcgaaaattaaatcaagtcattgaaaaaaatgatttcacataccattatttagaatttgaaggtggccatatgtggaagtcatggaaaccattattaggagatctgttaaaatattttttatcagataatatttctttttaataatctgaactaagatgactttagagtaacgaatttttcagaaatttgctataatgaaaatatgttaaacaaaggaggaatttaaatgattttaggattagcattaattccgtcaaaagcatttcaagatgaagtgaacgcatatcgtaagcgttatgatgcacattatgcgacaattatgccgcacattacgattaaggggcaatttaaaataaacgatggtgatttagaatctgttaaagagacaattaaatctaaaatcgaaggcattccaacgattgatatacatgcgacaaaagcatcaaattttgcgccaatcactaatgttatttattttaaagttgaaaaaactgacaccttagaaagactatttaatcaatttaacaatggagatttttatggtgtagcatatcatacattcgtgcctcactttactattgctccaggcttgactagtcaagaatttgaagatatttatggtcaattaaagttagcgggaattgattacaaagaaacaattgagcaactttctctagtttattatgatgaaaaagaagaaaaatggaaagtacttgagaactataacttagcttaagattaaactataaaatatgagtcataacatacgataaaaacttggaatgaataaaagcgccactcgcaatactagaaataaattttctaatatgcgagtggcgcttttttatattatttagttaagaagttttagttttattgttcacttttacaaaataaataccataaaagatggctaagaataagaatacaagtgctgagaaataaaaagtattgttaactgatttggtgaattcagtaatgagtccacctacaaggggaccgatcattgaaccgaaaccttgtacactattgaataccccccaagtttcttcttgttcatctgaatggatatgacttgccataaacgtattccacgctggcagtaaaataccgtacataagacctataaatactgctagcacccaaacgattgtaatatttgtaataagtgaaagtgcaaatatcatcagcgtgtataagacaaagccaccaaaaataacccagtacataaataaggtgccatgtttatctattattttagataagaagagcattgaaatagcacaaccgatcccgccgaacacaattgccatagtatattctaatgtggagacaccaacaactttagtagcgtatgtaggtaatatgggtaccaatgcagtgattgaagcaccttgtaataatataccagggaataatatcatgtgacgtttagtcacatcgactatttgccctaattgttgtttgactgggcgtgtattgtaattcgtcaatcttactttcacgaagtagtataatatccaagcgattaatacaacgagtgacattaaaaatgcaaattgagttggatggaatttaaaaatgacattcataccaaccataccgactagcaggcctaacagccaagagaaatatacatatcccatttgcttaccacgattattctcatctacacttgctaacataatcacccaaattggactcacagcgataccaagtaaaatggcactggctattaaaacaaagggcgatgtagggaaccaaatgactaaaaataaacttgcaaaggcaagtaagaaacctagtgttagcactaatttagtacctaaacgcttaagtaaaaagccaatcacaaaattggtagttgcatcagcaataaaatgtatagaaatagcgatagatgtaatacctaccgcgatagatgttgctgttggaagtagcgctaaataactgagtatgtacataccgcgagcgaattccatcaagaataagatgatgagcatgattatgaaatttttatttgagttgtaattatttaacgaagagctttgcatataaaggaacctttccatatacttcttcataatgagatgaatgattaagtaagtttaataaatctttacataatttataagttgaatatggaattcttgacgcgtccatagattctgacatcgaagctaatttggtcggtgcattcgttagagcagcgacttgctcaatagcagcttcaggtgtattagcaatacgaccatagcctttttcttcaaagtaaactgcattctcaagttcttgacctggcgcaggatctaagaaaatcatagggatttgtcgcgttaatgcttctgagatcgtgatgccacctggtttagtaatcatcaactgactcgaagccatccattcattcatatgtttggtataacctaaaatcaagacgttgttaaaatctttaaattgcgatgttaatgaacgttttaaatctttatttttaccacatatcatgacaacttgtgcatgcggactgcgatttaaaatttcttgaatcatttgaccaaaacctttagaaacaccaaaagcacccgcagacattagaattgtcggtttgtcagggtctaagtgattttgacttagccatgctgttttatcaatgtctgtttcgaatttatcagatataggaatacctgtaaccttcaatttatctttaggaatgccaatacttgcaaactcatctttcagttcctctgtagcaagatagtatcgttgagagaaaggtgtaatccaattcttttgcatacgatagtcagtcatgacagtagcgattggtatattcatatcaaattgctcagttaatacagacatgactggtgtagggaatgtgagtaagataaggtctggcttttctttcaaaagtaaattcattaatttatttaatccgtaatatttatagaaacatttatctaattgatctggttggctataataaaaagctttatacatatttctaaagtatttaaagctgttaatgtaccattttttacaaatagaagtgaggatagggtgtgcttctaaaaataaatcgtgttcgataactgttaaattgtctagattcatttctttgaattggttcactacactctgagtaacttgtaaatgcccattaccaaaagatccagtaattatcagtatttttttattttgagtaaccattaaaagccaccctccaatagattatatttagctcatgttaagtttaacgtatttttttaacgtgtgaaagaaaaaacacaattaataatgattatatcattttacaatcagataagaaatgctacatactgtattggaaattaatacatattaaaataagattgttgtatatctataccataccactattaatctagaagtaagcttgcaaaatggtaatttaagcaaatatatagaaaatattaacaattatataacatggggttaatatttaacagattttaaatgtataaaatagctatatacaataggaagaaattattagcatctcatctttagattctataaaataagttgaaaatgtgtataatagaactattggaaataaaggagcgataaatgttggatgcaaatgtgttgtttgaaaaaataagagtgaaacaagttatcggcacactagaaaaaaatataacagatataacgaccgattctcgtacggcacaacatggcagtgtgtttgttgcctcaaaaggttatacagtggatagtcataaattctgccaagatgtcgttaatcaaggatgccaagtgattatcgttagccatcagcaagaaataacaggcgatgtaactcaagttatcgtacctgatactttgcgtgtggctagtttattggcaaatacattgtacaattaccctagtaaacaattgataacttatggtgtaactggaacaaatggtaaaacgtcaattgcaacaatgatacaccacatatatagaaagttaggtaaaggaagtgcttatttaggtacgaacggctttcaaattaatgaggataaatcaaaaggtgctaatacgacgcctgaaacagtctcactgactaaaaaaataaatgaagcagtagaaaaaaatgcagaagctatgactttggaagtgtcaagtcatggattatcattaggtagattacgaggcgttgattttgacgtagcaatcttttcaaacttaacacaagatcatttggactttcatggtactatggaagcctatggacatgccaaatcattattatttagtcaattaggagaagacttatcacaagaaaagtttgtagtattgaataaggatgacgctttttcagaatatcttgcctctgttacaccatttgaagtatttacatatggagtgacaaatgacgcacaatttacagcacatcatatcaatgaatcattacaaggtgtgcagtttacctttaaaacccctgaaggtgagtttcaagtgaaatcaccttacgttggtttattcaatgtctctaatattatggcagcaatgattgctgtgtggagtaaaggtattgcgttaaatgatatcgttgatgcggtagaaaatctagaaccagttgaaggacgattggaagtacttgatccgtcattacctatagatttgattatagattatgcacacacggctgatggtatggataaactgatagatgcggttaaaccatttgctaaacaaaaattgatattcttatgtggtatggctggagaacgagatttaacgaagacgccagaaatgggccgggtcgcttgtcgtgcagactatgttatttttacacctgataatccagctaatgatgcccctaagacactaactcaagaattagcaaaaggtgctacacatgataattatattgaatttgaagacagagctgaaggtattcgtcatgcaatcaatatagcggaaccaggagatactgtcgttttagcttctaaagggcgtgagccttatcaaattatgcctggacatgtcaaagtgccacatcgcgatgatttaattggtcttgaagcggcttatgataaattcggtggtggtccacttgaagattaaaaatttacattttaatgaaatagctggtcatgtgtatatttatgaaaacaaagtgaatcaatgtatgttaatcgcaattcctgatatgcattggtcattagaaatcgattcatctttaaatgaagatgatatgaacgaggaacttgtgatacacttgtttacgttacttgatgagtcaacagcttcacaaattgctgatgacatcgttaaatggatatttgaaagttaaaggagagtataaatgagtataaaggaagaagtagaatcaagaaaaacctttgcgattatatctcacccagatgctggtaagactacattaacagaaaagttattactattcggtggtgcgataagagaagcaggtacggttaaaggtaaaaaaagtggcaaatttgcgacgagtgactggatgaaagttgagcaggagagagggatttctgttacaagttcagtgatgcaatttgattatgaccactataaaatcaacattttagatacgccaggacatgaagacttctcagaggacacatatagaacactgatggcagttgatagtgctgtaatggtgattgactgtgctaaaggtatcgaacctcaaacattgaaactattcaaagtatgtaaaatgagaggtatacctattttcacatttattaacaaattagatagagtcggtaaagaaccttttgaattattagatgaaatagaatctacattagaaatcgaaacatacccaatgaattggccagtaggtatggggcaaaatttctttggtattatcgatcgtgaatctcacacaatagagccttttagagatgaagaaaatgtactgcatttaaatgatgattatgagttggaagaagaccatgcaatgaaaaacgatagtgcatttactcaagcaatcgaagagttaatgcttgtcgaagaagcgggcgaaacgtttgataatgaagcattattaagcggtgacttgacacctgtatttttcgggtctgcactagcgaattttggtgttcaaaatttcttgaatgcttatgttgatcatgcgccaatgccgaatgctcgtcaaactaatgaagatatagaagttagtccatttgatcttgatttttcaggatttatctttaaaattcaagctaatatggatcctaaacatagagatagaattgcatttatgcgagttgtaagtggtgcttttgaacgtggtatggatgtaacccttcaacgtacacataaaaaacaaaagataacacgttcaacttcgtttatggcagatgataaagaaaccgttaatcatgctgttgcgggcgatattattggactttatgacacagggaattaccaaattggtgatacgctcgtaggtggtaatcagaaattcagtttccaagaactaccgcaatttacaccggaattgtttatgaaagtttctgcaaaaaatgttatgaagcaaaaacattttcataaaggtattgaacagcttgttcaagaaggtgctattcaatattataaagcattgcatacaaatcaaattatcattggtgcagttggacaattacaatttgaagtattcgaacatcgtttgaaaaatgaatataatgttgacgtagtgatggaaccggttggtcagaaaattgcacgttggattgaaaacgaagaagacataaaagataaaatgagtacatcacgttcaatcttagtaaaagatatatacgataactatgtattcttgtttgaaaatgaatttgctacaagatggtttgaagagaagttcccagaaattaaattatatggattgttataaattttatttttgtgtataataactatattaatagaatacctatgactcagttgtcagaggggagtaacttaactttagttgaaaatatatgagtttcgcatacaatcgtttatatatggtaagtaatgcaacttatttatcttttaacttagtcattttatcgtcattacgaagtatcaaacttccggtaaagtgggcagaataaaactgtcgagtgagacctttgctaatagtgaatatggattgccagttggttcttaacatcattatagatgatgaagacaagtgcaagttacgtaaacactagcttagcttaggtctctatttttatgcttaaaaaattaaaggagttgtcctatatggatccaagtttgattttaccttatctatgggtactattagtgctcgtatttttagaaggtttactcgctgcagataatgcagttgtaatggctgttatggtgaaacatttaccaccagagcaacgtaaaaaagcactgttttatggtttgattggtgcatttgtatttcgttttatttctttattcttaatcagtatcatagcgcatttctggtggatacaagcactaggtgcgatatatctactttatatgtcaatacggaacttgataaccttctttaaagagaaagatcagcaagagcatgatggtaccgacgatcatcattttgatgatgatggagaagaaattcatgccagtgctaaatcattctggggtacagtattgaaagttgaatttgcagatattgcttttgcaatagactcaatgcttgcagcacttgcaatagcagttacgttaccagcggttggtatacactttggtggtatggacttaggtcaatttgctgtgatgttcttaggtggtatgataggtgttatcattatgcgttttgcagcaacatggtttgtcaacttattaaacaaatatccaggtttagaaggcgcggcatttgccattgttggttgggttggtattaaacttgttgttatggtgttagcgcacccagacattttaattttacctgaacacttcccacacagtattttatggcaatctatcttctggacagttatgatattattagttctaattggttggttgacgtcagttcgtcaaaataaaaaagaagagaaaaaataatcatttattattagactggaaagccattgtgcttttcagttttttgtttgcagaaaatagtttattttaaataatgattgtttaagtaaatttaaaaatatctgcttaaattatttaaagagaaaatgagataaagttagaaatttgtataaaaagagcttataatcaaagctaaggtataaatgataaaatatttgaaaatataatagctaaatagtaaatttggcgatttctgcaatacatttacacactcaatcaaaatagaattcagtatgaatatttgtgtgtactagtaaaataaatcggaaaaatccttaatgatatgtcataatggatagtatagaaaagatgtagtttaggggggcgtttttgtggcgaatgataaaaaacatgtgatcccaagagagaaatatggtcgtaaaagacgagaatattttcacaatgaagaacgggaacaacgtgtccaaatggaacgtaaagctagaaaacaacgggctgaaaaagcggaaaaattagcaaagaataacgaagaacgtgttaaagaaaatttaagaaaagcacgcatagaaaaactaacacaagaagaaattcagcagcaacaagcaatggctacgaaacgaaatagcagtaattcagaaagtgaatttgaaccatctgaagataacgctctgaatcatgtatctaagcaacaaccagaagaagtttcgcctacatcggatatagccaaagatgatgttgaagtggcatcaacgacaaatgaaacaaatggttatttaaaaaccaacgaaatatcaaatgattcagatatagatgtaaatgcgtctactaacaaagaccgtttacatgatgattatttttattctgaagaagcgcaacagtcaagggttaatcagtatattgaagaagataactcagataaggttcataacaatattgccagaaatcataagtctggacagacagatgataaatctgaccaacacagacatagtgaccaaccaactttaatagataaagttaagtatttcttcaaagaacactgggcgaaagtactaattgtattggcagttattttgttaattgtcttaattaatgccatctttaataatgtagatcataatggaaacacgaaggataatatattccaaagcagcgataatgctaataaagaaaaaacatatacagatacaatgaaaagtgcgaatagtgccattcattccatcgtaacagtcgaaaatgatacaagtaataatagttcatctgcggagaaagagacacaagaagcaggaaaagaaaatgaattaggatcaggtgtcgtctacaaaaaagtgggcgactctatttttatcatgacgaatgcgcatgttgtaggtgataaaaaggaacaaaaaattacatacggtaataatgatacatctattggtaaggtcattggaacagacaaattttctgatattgcagtagttaaaaccaaaataaaatcaggtagtgatgttaaatcaattaaaatgggtgattccagtacattagtcctcggtgagcctattattgtcgtagggaacccactaggtgttgactttaaaggtagtgtttcagaaggtatcgtgtctggattaaatcgtcatgtgccagttgatatcgataaggataatcaatatgatgtgctcatgagcgcttttcaaatggatgcacctgttaatcctggtaattcaggtggtggtgttattgataaaaatggtaaattgattggtatagcttctttaaaaattgatatggatcatgttgaaggaattgcatttgcaatcccagtcaatgacgctgaatctattgccaaacaacttgaagcaaaaggtgaagttaaatatcctaatactggcataaaaatcgcgaatgttaaagatatggatgaagctacgcatcaatcccttaacttacctgaagaggttaataaaggtgttgtcattggagatgtaaaagacaatagtttaggtgaaaaatctgggttgcaaaaaaatgatgtaatagtagaattagatggtaaagaagttgaagataatctaagatatagacagattatttttagtcataaagatgatttagatacattgccagcaaaaatatatagagatggtaaagagcaagatatcaagattaaattgaagtagcgttgaggtgagtacgcgttgtccattttcaatcaattatttaaaaaatcaagtcctcaacaaggtattgtgatgtattatatagttgcgattatcgtggcattcttactgttgaacttaccttatgttcataaagcaggtgtctctgtagacccaatcgattcattgtttgttgctgtttcaggtgtgagtgttacagggttatcaccagttaatattgtagaaacatatacgacgtttggacaaattatcatcatgatcatcctaaacattggcggtattggtgtaatggcaattggaacaatgttgtgggtagtacttggtaaacatattggtatgcgtgaaagacagttaattatgttggataataataaagatacaatgagtggtacagttaaattaattctcgatatcgtgcgtaccattttaataatcgaggtggttggtgcagcaatattaacgttctatttttatcgagataaccctgatttgcagtatgctatcatgcaagggttctttgttgcagtatcggcaacgacgaatggtggtttagatattaccggtcaatccttgattccatatgctaatgattattttgtgcaaaccattgtaatgtttttaattatattaggttcgattggctttcctgtgttaattgaagtgaaggcatatattaaaaatagaatccctaattttagattttcattatttgctaaaataacaacagtaacgtatttagtactatttgtatttggtgtcattatcattttactatttgaatataaccatgcattccaaaatatgtcttggcacaaatcgttattctatgctttgttccaatctgcaacgacgagaagtgctggattacagacaattgatgtaagtcattttggtgaaggtacgaacgtgattatgagcatcttgatgtttattgggtcatcaccaagctcggtcggtggtggtattagaacaacaacatttgcaattttaatcttatttttattgaactttaataataatagcgagaaattgtcaattaaagcatttaatcgtgagatacatacaacagatgttcaacgatcatttgcagtgttcacaatggcaggtattttaacttttgcagcgacgatttttatattagttgttgagaatggtaaaatttcatttcttcaaggcttttttgaggtgatgtctgcgttcggaacgtgtgggttatcattaggtgtcactggcgattttaatgatatgtcgaaagttacacttatgatattaatgtttatcggacgtgtaggtttaattagctttattataatgattggtggacgtagagaaccagataaattccattatccaaaagaacgtgtgcaaattggataatgtgatgagcatagaatcctaaaaaaacacttagttgaacgacaaattcaattaagtgttttttaattatctatttttaatatagttataaataatgaagataagatattagtatcgacgtaatttaaaaacatgttaaactgtgattaacgaggagagaggcatatgaaaaaaagtgaaaagattgcaattgatgttattgctacttcagatatgcatagttattttctaaatggagataatggttctaatatctatcgagctggtacgtatgttaaatcgaaaagagaagaaaatgaacatgtcattttactagatagtggcgggagtttagcgggttctctggctgcgttttactacgctgtggtagcgccatataaacgccatccaatgataaaattaatgaacgccatgcaatatgatgcaagtggcattagtcctaatgaattcaaatttggattatccttcttttctagagcagtttcattatcgagatttccatggctttctgccaatattgaatataagaaaacacgtgagccttatttttcaacgccttatacaattaaagaaatagaaggtgttaaaattgcaatcgttggattaacttcggacggtttaatggagagagagcattttgaaatggagaatgatgtacaaattgaaaaaaccttgctgtcttctaagcgatggattcgatttattcacgaaacagagatgccagaatttctaattgtcatttatcatgggggattagatcagcttaataagtcatcaaatgaacgtgagcaaaatgtgaatgaagcagaaaaactaatgcaaaccttaggtgtcatcgatttgcttattactggtcatcagcatcaaacatttattggaaaagatgaaaaaactttatatgttcaagctggccaaaatgcagaacagttaatccacgtgaaaatcaattttaaaaagcgaacgaattcattcgaattagaaaatgtagaatcaaaaatcgttgatttaaatgaatataaagaagatgaagcgttattagatttaacttattatgatcgaaaaacagttgaacattggggaaaagaaattttaacaaataaagatatagatgcacatattgatgggttagatgacgtgattaccaaaccccatgcatttacccaactattacatgatagtatacgtcgcaaatttgattatgatatttcctgtgtccatttgcctacaagcggcgaaactggattatctggacaaattactaatgaggcattatataatgcatatcctcatccagatgtaccaattgatttaactttgaaaggtcaacaaataaaagaaattttagaatattgttatgcacatattgaatttagtggaggttcgttaagcttaactattgtggatgaaacactctgtacattttggcaaggtgtggactatacaattgatatgaatgcattgccatttgaaagagttcaattaaataatataacattagatcatatgtatcgcgtaagtatgacagattattgctacagaaattataaacaatatttagagcaagcagttattcatgaaacaggtgaaattacgatggttgaattgatttcacgaaatttgaaagatgaccaatataaaataaaacaaaaacagacatttgaagttttaatataagcaggtctagtatataagtaactttgactaaaaataaacgtcaatttctattgagataatatagaaattgacgttttctttactttttgcaaaattatacgaaagtatctttatttagaatattaaattaaagattatatgatgttgtaacatcctgactctcgggcgcattgtataaatatcgttttgtatcgctaactttcaatagcttgaatgaatctccaaaagtgcaaaatgttaataacgaaaggggagtgggacagaaatcaaatttttaaatagagatttcgtagtcccacgtatgcaatcaaggcaaggatgactaggattgaaatgtttatctgagctaaagcccatgcataagtctcctagaattttatgcagaatacataagctttggcttatgcataagaactactgattttcataaattgaaaaagtagttctttaaatcagtgagactttacattttcaattcagtcatctgctgcctaaatgaaaaagagtctgagacaactatttatgtctcagactccttttcatttgagaagggtattgaagtcccaacgtttattaataatcgtataggtttatacgttgaatattaataagataacaactgctacaatttgagctacaacagttgttgctattctacgtgtatagaaataacttaatgaaagtgccatttgtacaataaatacaaagaaaacaatccataagttgtcaagatagtaaaataatgaagcagaacataatgctgtaattataatacttaaccaacttgggatatttaattttattaattctttttgtaaaacagttctcatgtaaagctcatgacaaggtataacaaagactaatgttactaacatttgccatttataatagacacccgtacgtgtgagttctttgattaattcagcatattttatatcagaagcaattgctgcgataataagttgaataataatcaatacaataccagtaataatgcccacacctagtgatgtgagtaaacgtttagattcaatatctctctgataaaagatataactgataccagcaattagcataatgcccgtataaagataccaatattcttgtttctcgccccacattaccaaaagaataatgtggaatactatgaaacttacgacaaaccaaattagtgccttagaaattctattcattttaactatccttcttgttcgacgattgtgtatcgtttgtgattaatgacagttttttctggcaagtctagttcttcgaagttctccataattgttaaatcaacaattactgagttgtcattaattttttcaactcgaccttttaagccgtcataaaattctacgatatttcccacttctgcaacagtcatttttagtcctccctagaaatgctaactagatagtattatacaaaaaatcggcagacaaataaacaaaaaaccattaaattgcatgatgtaaaacaattttcaatttttagcaaaatatcaaagtgaatgattggcaatttttgtgaaaatatagcataaatagggtaagggcatatatttatggaaaaggagtgcagtagatgaagtttattagtaacaacgacattacagatccaacattaaatttggcaatggaagaatatgttttaaaaaatatgccaaaagatgatagttattttttgttttatgtaaatagaccttcgattattattgggaaaaatcaaaatacaattgaagaagtgaatcaaccatatatagacgaacacggcattgatgtcgttagacgtatatctggtggaggagcagtataccatgacacaggcaatttaaactttagttttgtaactgatgatgatggtaacagtttccataatttcaaaaaattcacagagccgattgttgaggcattacaatcattaggcgttgatgctgacatgagtggtagaaatgacattcaagtaggtagtgcaaaaatatcaggtaatgctatggtcaaagtaaaggatcgtatgtttagtcatggcacattaatgctaaatagtgaattgaatgaagtccaaaatgcattgaaagttaatccagcaaagattaaatcgaaaggtatcaaatcagtaagaagcagagtagccaatatttctgagtttttagatgaacctttagatattgatcgatttaaggaaataattttaaaaacaatttttggagaagctacgcaagtagaagaatatatattaactgatgacgattggaaaaaaattgaacaactaagtaatgaaaaataccgtacatgggaatggaattacggtaggaatccaaaatataattttgaaagagaagaaaaatttgaaaaaggtttcgttcaaataaaattagatgtaaaaaaaggtcggattgagcatgcaaaaattttcggtgactttttcggtgaaggggacataactgaattagaaaatgcactagagggtacaatgcatgaattcgatagtatagaagaagcactttcaaattacgatatttatcattattttggtgatattgaacgctacgaattaatcagattaatgtcataataaataacatataaaaaggtctattctctatcttaattttaagtagggaatagaccttattttaagtaacaaaacaataaattaaccaacgagaaattcctccaaatttttgtattcttcagtatagcgtttgaaatcattctcgtttttattttttaaagcattatcaatgagttgttccaatttttgcttacggacgttccgcaatgattcatctatgatcaattcaatgcctaaatcattaatcgtagatacaaatgattctagtgtattgtactttacatgtgtattatgtttcataatcaacacagcccctctatctatatttatatacagtatacaaggttttaatttttaaatcaatgaatattcagacttttccgaaaaaataagtgtaaaatgcaactttacaaaaaataaattaatgcaaaagtatagatactaaaaattaattgcagaaaatttataaaaattattattatataagttgattttaagatgtttgtattatattatttgattgtcgccataatatataaggaggtaaaaatatgattcaaccctatatcattaaaaaaggggatatggttttacaaccatgcagtttatcaactggtaagtatgaaggtagttatcttttaaagtataaggatgacagcaaagttctaaaagaacgtgttccaaagattattgatcgatcgtgtagattttatggtagtagttataattttaagaaagaagatacgatgagaattactggcataagcagtaaacccccaattttatttactccactttttcctacttattttttcccaacgcactctgatagaaaagaagaaaatacttggattaatattcattatgttcaccaaatcaaaccactaaaagaaaagaaatgtaaagtgacatttgtagataatcaaacaattgtagctaacatttcagcacatagcatgcatcatcaatacctaaatggtatttattattactatatgatggatagggcagcaagagttgctacctttgatccagaatctcctattgattatacaaaacctcaattaaatatttatgaagcattagcaaaatattcattatttgaaaataaatcatagtaaatttggcgacgtaagcatgtaaaaatgatatatgtggaatattatattaatttagtgtaaatattccgcatatttttttacgtttactacttgaaaatttaacgagagttgatataataatatttgtgcttgattagagcaacccattattccacagtagctcagtggtagagctatcggctgttaaccgatcggtcgtaggttcgagtcctacctgtggagccattggaaacgtactcaagttggctgaagaggcgcccctgctaagggtgtaggtcgcgagagcggcgcgagggttcgaatccctccgtttccgtaatataaaactttgttttaaacaccgtaatcctttttgggattgcggtgtttttttgtgcgtttaaagtaagtgaattaagtagtgtttgcaattctataaaatagctcaaatcatatttttgttaatcacaaaaaaataatgttatattaataatgaattaatgtttattgtataaaaaaataatataattttaaaaggagattttaagatggtcaaacctttatatgaaacaaaagtgattagcaatggtggaagagatggtaaagtatttagtgaagataatacattttatcaggatttagcagtgccgaaagagatgggtggtaatggcgtaacagaatctaatcccgagcagctatttgcagcaggttacagtgcatgttttaacaatgcacttatgcatattttaaaaagcgatagtaaaggcacgattgaaccagaagtaagtgtgacagcttatttattaccagacaagaatgacggtggtgttaaattagctgcagaattagatgtaacgttaactgatatgactcaggaagaagcagaaacttatgttgaaaaagcgcataactattgtccatattctaaggctttaaaagaatcaatcgatattgaaattcaagtcagtgtcaactaaattaacgaagatagaaaaagcttataacccttaaagtacaaggcgttataagcttttttgatttatacaatttgcgattagctttattatttatttttacttattaaatttctaattgctttaacaatataacctacagctaaagctctgaatacacgttgaataatatttttcatcctaagacctcccaaaatacaattgaaatgttttaatttgcgttattttctatttacccaattttaagacaaaatatagatgattttgcaaattcataaattttataagaggttaaagtctatttctcgaggataatcaatccatcttcatcagctttgttgaaaaatattgttaacaatccactaataatcgcaatgatataggggataccagtccaaaagaaaataaggtgaagtattccttgtaaaagctgatttgaataaaatttgtgtataccacaccagcctaaaataaacgcaagtacgacgtaaatgactttatttactttcattattccatatcctttcataaattatagttaatacggtaattatctcttatcttttacgatacaacaattgatttaaaagagaaaaattaaatagtattaacttcgaaattttagattttatcatttataattaaaataaataattaatgaagctgaggagattatatatgattagaaaagcaaatccaaacgatattcaaaaaattgcagaattgtgttacatcatttggcaagaactagaagttgatatggtaaaaggtattgaaaaggaacgtttactgaaagtaatggagcaaagtatgattgaggtaccttacagaggtcattatagcaatacatggatatatgaaatagatggagaggtagcagggtgcttaattgcatatcctggcaataaggaattagaaatggaacgtgcgtggctagatatgacgttagacgatgatattagagcatacggatcgccgatgccgatgaaagaagctaatgatgatgaatggtatatagagacagtcgcaacatttccacaatatcgtggaagaggtgttgccacacagttagttaaacatgtgctaaatgcatataaagatggaaaatggagtttaaattgtgatgtaactaatgaaggcgcattaagtgtgtataaaaagttgggatttgaagcgaatagtaaatttgatctatatggtcatatacattatcacatggtttataaagcgaattaaaaaagccgagacatgaatatatgtctcgacttaattcagcttatttacagtggttaacagggaggaaaatgtatacgtccgagtcatgggaatgtgacactagcacgttcttaaataccaccaagtaatgcgctaacataaatacctaatgcatatagtaaaccaaagaatgtattggttttacctgtcgctgccatcgctggcatcattgtttgaggtgtatcgtttttcttgaatctacgcacggctttaattggcattgggaatgaaagtaatgctaataaaaagaagattgaaccaccagggataaagaaagtgatataaataacaagtacataggcaataatatacatgaggcctaagaagcgtactgaattatttttgcctaataagattggtagtgtctttcgaccactttctttatctttaacacgatctcgaatattgttggccatattgataagaccaatagtgattacaattggaatgcttatccaaacaacaaagctttgtaaattgccagtttgaataaagaatgcaattaatataataatcatacccataaacacaccagaaaacagttcgccgaatggtgtccatgagattggtaaaggaccaccagtatacaaataaccaactgccatacaaactagaccaattggcagtaaccagaatgagctttgtattgcaatgaaaatacctaataacgcagctataatatagaatgcaatggctaaattcattactaatttgggactcataccatttcgaacaatggcgcctccgatgccaactgaagtatggtcatctaagccttttttgaaatcatagtattcgttaaacatgttcgttgcagcttgtattaatagacaggcaattaacatagctaataagagacttagttttaaatgatcttcactccccagtaagaagagcttagctgaagcagtaccaacgagtacaggtacgacagcagcagtcaatgtatgtggtctcattaactgccagtactttttgacagttgaatattgttgatattgagatgacataatgatttacctcgaattctttaaatttatgatattttttatctaatatattttaatagaataaggtgtaaaggtcaaattacgtaaaaatttgtagtaacgaaataagctagaaaccatacacacattgtgaaaagtggtacaatattataatgagtgtaaactgataaatgaaagaagtgaaatagatgacattagacctcagggaaagtgaaattgtcgaagcggtatacgaaagtaatcatacttgggtttcagtagaagcaaaaatagactatgaattagatcctacagtattattccatttgactgaagaaaatgctggagaccgtttttattacaagaaaaatgacaacaaaacttcattctttggctatcatgctattactagatttaaaaatgattttgaaaataaacaatctatttttcgagaatggcaaaaatacaaaagtgatattgaattaatacatccgagctccgataaacatcatctgaagatttgcggaggtttccaattctcaatgcataaatctggtgatgagtggcgagaatttggtattaatcattttatactaccagaagtattaataactatggaaaatggtgtttcttatattacttatactgtaaaagcagaacaatttgaaattgaacaatttaaagcgttgattgcacatttaactcaaaatacaatagattctgagtttgaaattggtaatattaaacgcattgaagatatatataaagatgaatggcgtgatttagttaaggatacaattgatgtattagatgaacataaaaaaattgtattagcgagaaaacgtttggttatgtttgataaaaatatcaatataccgtatatcttacaaaaagcatcacaaggtgaacataatagttacttatttgtcttagagtcacaggatagtatattcttctcgcaaacaccggaacaattaatggaagttaacaatggtatattatctaccaaggctgttgctggaacaatcaaacgtacacatcaagatgaagtagataaagaaaatatacaggctttcttaaatgatgataaaaatttaaacgaacatcgtttcgtagtagaaagtatattaaacgatatagcaccttatgttagagatattacttttaacgaaacaccgcagatattaaccaatgatcatttatatcacctatatacaaaaattaagggtcaattagaaaatgattcatatattggattgttagacaatttacatccaacaccagcgcttggaggctatccaaaagctgaagcaattgaatacattgaacaaaatgaattcggtacgcgtggattatatggtgcacctgttggatatatagatatgaatgatgattgcgagtttattgtagcaattagatccatgctaattaagaaaaaccaggccacattatttgctggttgtggcattgtgaaaaattctgatgcggatagtgaagtcgaagaaactgcagttaaatttaaccctatgatgaaagctttaggagtcgaggaatatgaataatcatacagatgcattaacaaagcaggtctttacaattgtttctgaattatatgcttatggcattagagaagtagttataagtcctggatcgcgttctacaccactagcaattgctatagaagcgcatcccaaattgaaatcgtggattcatccagatgaaagaagtgcagccttttttgcaatgggtttgatgaaaggtagtgaaaaaccagtcgctatcctttgtacatcaggaagtgcagctgctaactatacacctgcgatttccgaaagcagtttgagtcacttaccattagttgtacttacaagtgatcgacctcatgaattaagaggcattggtgcacctcaggcaataaatcaaacgaatatgtttgctaattatgtgcagtatcagtttgattttccaattgctgaaaagaatgataatgaagatataatggcgaatacaattaaattccaattgcaaaaagcgagtcaatttctttatggcccacatcgaggacctatacatcttaatttaccttttagagaaccattaacaccaaatactgaaaaagtagaatggttaacttcagatacaaagatattgccacactatcaaaaaacaacgagtttaaatgaaattagtgcaatgatgaaaaaaagaaaaggtttaatcattgttggtgatatgcaacatcaagatgtggatcaaattcttacattttcaacaatccatgatatgccaattttagctgatccattgagtcaattaagacgtgaacaccatccgaatgtggttacgacttatgatctattgttgagatcaggtttagaattagaggctgattttgtcattcgtgttggtaaacctgtaatttcgaaaaaattaaatcaatggttaaaagtaacagaagcattccaaatattagtacaaaataatgatcgtccggatgcatttccgatcaccccacacgtatcatatgaaatgtctgctaatgatttctttagacaattatcagagatgccaacagttgagcgtaagcaatggttagagaaatggcaaacagtggaaaaacatgcaatagtagaaatcaaagatcatttaagaactgctacagatgaagctgcttatgtgggtaatgtattagataaattaaccaaggatgatgctatatttgtgagcaatagtatgccaattcgtgatgttgataatctatttattgattgtgaggcagaagtattcgcgaatcgtggtgcgaacggtatagatggtgtcacatctacggcgttaggtatggccgtgcataaaaagattacattgttgattggagatttagcattttaccatgatatgaatggcttattaatgtctaaattgaatgatatacaactcaatatcgtcttacttaataatgatggtggcggtatcttttcatatttacctcaaaaaaatgaggcagatgcatattttgaaagattgttcggtacaccaactggattgaattttgaacatacggcgttattatatgattttgcatttgatcgatttgatacgattgaagcctttaaatatgcagatttatcgcaatttggttcacatatttacgaaatcatgacacatcgagaagataacaaacagcaacatcttaaactctataaaaagttgagtgatattatcgatgttacattataaatttcatcaatcaaccgtaccaacagacaaattgttagtcatgttgcatggctttattagtgatcaacagacatttgatcaacatattcatagtctaaataaaaatataaatattttaactattgatttaccgggtcatggtgcagatcagtctgatttagagcataaatgggattttccttttataagtcatgagttagatcaaacgttgcgattatttacaaattatcaaatttacttacatggttattctatgggtggtagaattggactttactatgctttatatggtcaagcgcaattaacagggcttatactagaaagtacatctcctggaattgaaaacagtgatgagcgacaagaaagacagctagttgatcaagctagagcaaaagtgcttgaaatagctggcttagaggtgtttgtgaatgattgggaaaaattaccgttgttttatacgcagtatgagttagataaatcaacaagaaacgcaattcgtgatatgagattacgtcaaaatccaatgcgtttagccaaagctttgcgtgattatggaactggacaaatgccgaacttatggccacaattaaatcaaattcaaataccgacgtgtatcatagtaggtgaattagatggtaagttctgtaaaatagctaaaaatatcgtttcagttatgccaaattttgaaatgcatgttgttgctaatagtggacatacaattcatgtggaagaaatggcagaatttgatagaatagtcataggttttattaataaggaggagcaaaatgactagacagtgggaaacaattagagaatataaagaaattaaatatgaattatatgatggtattgcaaaagttacaattaatcgtcctgaagtacgtaatgcattcacaccaaatacggtacaagaaatgattgatgcatttacaagagcacgtgacgaccaacgtatttctgtcattattttgacaggtgaaggagataaagcgttttgttctggcggagaccaaaaagtccgtggccatggtggttatgtaggcgatgatcaaattccacgtttgaacgttttagatttacaaagacttattcgtgtaatccctaaacctgtagttgcaatggttagaggttatgctatcggtggcggtaacgtattgaacgttgtatgtgatttaacaattgctgcagataatgctatctttggccaaacaggacctaaagtaggttcgtttgatgctggctatggttcaggttatttagctcgtatcgtaggacataaaaaagcacgtgaaatttggtacttatgtcgtcaatataatgctcaggaagcattggacatgggcttagtcaatacggttgttcctttagatcaagttgaagatgaaacagtacaatggtgtcaagaaatgaaacaacattctcctacagcattaagattcttaaaagcagctatgaatgctgatacggatggattagctggtttacaacaaatggcaggagacgctactttactttattacacaacggatgaagctaaagaaggtagagatgcatttaaagaaaaacgtgatcctgattttgatcaattccctaaattcccataaaaatttaggatgtgaaagtattgtaataggattacctgagctaaagctcaagcataagaactacttattcacatataatgtgaaagtagttctaagttgtactttatatctactggtaattaagaaaagagtctggacattttgacatgtgccaggctcttttttattaattttagaatatcaattgtatttaataattaataataatattaatattcaagcgtactaatattggtagattatgatttgttattgtgagttagttaaaaattttagaatgtaaattcaaaatatttaccttaatgttttagtttttcttttcaaaataataaatggtggtatatctttatatgtgaaaacttttttacaattaattattaaatttgactattattaaaacatctattaatattattattaatagattgggggagacagatgacttcaaacgattatgatcaaatgagaaaagaaatgtgctatttattttatattactagtaaagaagtagtaaatagatttaataagtatttaaagcaatttgatattagctttccgaattatattgtcttactttatattgaaaatgataaacctatatatattaaaaccttatgtgatgaactttatttagattcaggtacaatcagtccaattattaaacgtttagaaaaaaaatcacttattgagcgtatgagaacggaagaagatgagcgcagagtgaaggttcgattaactgaaaaaggattagaattgaaagatcattttccaaaaatatcagaggatgtcattcaacagtttaatatgaagagggaagattctcttgcttattatgaaattttaaaaacgttcgctgaacaaaatatatatataaatgatgaagaaagataaatataacaagattgaatagctgacgagcagcacttgtttataaaaaaaccgagtaaaagttattaatagacataacttttactcggtttttaatttaattatatttatttttaaggtaatcttctaatcttctcatggcttcttttaaagcatcaagttcgtatgcgtaagatatacgaacatgcccctttccaatatcagtaaaagatgaaccaggtacaattgcaacatgagcattttccagaacatctacacaaaagtcaaaatcgttttctgtaaagcgttgaatacttgggaaaatataaaaagcaccttcaggtttggcatcgagttcaaaacctaatgattcaagtttttgtataaggaaattacggcgttcaatatatgcttggttcatatattgtggtgcttcaagtccttcgttcaatgcagcgatacaagcaatttgtgctggtacatttgcacaaatacaattgtaggcatgcataaaagttaatttttcaataagatattctggacctattaagaatccaatgcgaatacctgtagcagagtgagatttacttaaaccaccaactaataataattgttctctaatagatgggaattcagcgaatgatgtatgtttgccagtaaaagtgttttcagcatatatctcatcactaataacaaatataggcatatgctttaaagtttcagttagtgcttgaacctcattgtggttcaaaatgacgcccgttggattagtagggtagtttagtaatatggctttggtcttcgcagttaaatgtgcctctatagcttcaggtgtgactttataattcgtctctgtggtatcaatataaaccggcacgccacctaatgttttgataagtggaatatagccagaatatactggacctggtattaatatttcatcaccttcatcaatgatgcttcttaatgcagtatctaatgcttcactagcaccgttggtaataataatttcttcggaactatatttaaatccataacgttgatggaaatattggctaactgcatttcttgtttccactagacctttattatgtgaatagcttgtttgattttcatttattgcctggatataagcagatttaacaacatcaggcattggaaaatctggttgaccaattgttaaattaatacagtcttttataccgctaatacggcttgaaaattgacgaatacttggtgcacttaaatgttttgaattattatttaatgatagtttcattgtataaatcacctcaagatttaaaaataccaaatttaattttatatgtagagttagagcgagaatcaaagatagctttggcttttgattctcgctccacaagcatgtcgatataaagttataatggatagcaaaaatttatatcatgcttattttttaatgatacttgctataaagcgattgcgttaattaatggttacgcatcattactttaaatatatcatatcgcgtttcacagtacctttattctttgaatttagaaggggattgtagattaataattggatttgtccattttgatacaaaacgtgttgataatgcatagacaataatcgtcgtaaagagcagtaaatagacataagttaatatcgatactgaatctttaaatggataaataccgaatccacgtataaccccgatgactaaaccatgtaataaataaacatacattgttctacgtccaatataagtgtaaaacttttctttttctggtattagatttaagaaagagaaaagtgttattaaaattatgaaataaagtaataaccttttaataggactgtataagtcttgtttaccttcgagtgacatatagggtgagtcacctaataacctatctgcattaataggatgatatgtataagtaacataaaatacaatcaaaatgatgatagagattggaacaagttttttattttttaaagtttggatatgcttattcgtaaacagataacctaaataaaatattggaaagaacatgatggttcttgaaaagcttagataattatcgatatttgatgaataacccgcaaataatgagataattatagcaatcggtaaaacatagtatggtttataatccttcacgattactaatataacgtggaaaaagaataatgtaagtaaaaaccataatgcaaatactggatcgaatggatcaaatttcacactatcttctttaccagttaaataatagtaaaaagagaaaaagccaaagaaaataacgtaaggaattaatagttttttagagactttttctaaataaccagcttggcctgctttttttgcaaaataaccagaaataaataaaaagcccggcatatgaaagctgtatattgttaaatacaatgaagaaagatgtttactggcttctgtatatggctgtaataaatggccaaacacaacaagaaagattaacattgctctagcattatcgaaaaagtaatctctctctttcaattgtgacattattttgctccttttatatatgcgataaattttatatgcgctacttctaatttattataaaacatatgagaaatgcaacaaaatagtacaatttgtcttttattattgtatattaggaagaatactattataatattagaaaataaaatagtgtatttaacctcttaagaatttaatttaaagtagtggagatgaccaacatgtataaacaactagaacaattaattacactgacgagcaatgatcttaatttagtaagtagacgatttggacaacgtacagatttaacttcagagcaattggagatgctaagaattttatataattataaaaagttatctcaatatgatttaacaatgaagattaataaagaacaatctatcgtatcacgttggatcaagaagttatgtcaaatgggttatatcacgagcaaacaatccaataaggatatgagatgcaaagatttaatggtgacagagaagtcaaaagctttagtcgaacaaataaatgaagttaggatagcgctaatcgaagcacgatgtcaaaatttaacagctaaagatattgaaagcttaaatcagttattaaaaaaattaaatgcacatcatacatattttattaaatgaaatataaaataaacgaagcgtaggtgatatatagcacttttttgaaaagtgatgtattacctacgtttcgtttaatatcttttgttatttataaagcataaagtgatttttactttttagtcatcaaataccaaaaattgggatacaggtaaagctgataaacatttaataatgcctctaaaaagtagtacgattatttataagtatctacgtcgaagtatttacctaatttacccattgaatcataaaaccctttaatacgtgtagcattatgtgctgcccatgctacatctgttgcatattgatgaacacctggattttcagggttccaacgcattttgtaaagtgtgttttgaccttgattgatatatgagccagcgatgaatttagcaccaccaacaattgcttttttaacagtattccaaccattattcttggctgtagcgaaaccttgtttaacagcatcgctatcaacagcaccaataccaaacatattatagtatttatctttgccattagttacgactttaccgttaacaacatctccgccattagctagtttagatgtaccattaccagtttcaagtagggcatgtgaaattaaatatacttcattgatattataagctttggcagcttcgctaaatgcttcaccttggccttctaaaatacctttaccaactaatagtttatccaaatcagctgaagaaatattttgtgatttatctaaacgtaagaattgatatttttgagttggatctttaattaatttgctagaatccatagcatttttaatttcagttgcagaagcatcttcccatttaccagctgtatgttgaatttgtggtttgaatttcaatcctttttggatagcaactgcttgatcaagtgtaagacctgatttgtaatatttcactaattctttacgtaagtcatcttcttttacccaaacaactttaccattagctaatttaccatggtaccaagtgacaccattaatgacttgtttttcatatacagtgaaaataccttcataaaagtctttcaatgaaccagcagcttttcctgttaatggatcaatataataactacctttttggttatgaatgatgtaatcatattttataggtgttacagctgattttgtaacgctaggtgtcttcgtggtactatttaaatcttttgcagcaatccaaccagttttattattaacaataccgtagatatattcatctttgtcaacgtagactgattttgatgcattaaattgattgttttttacattttttaaagtatctagttgttgtgattttgtaccccaagggacagcataaagaccattatttgtagctttaacagtatattgaccatttttagccgttgtcttacttaagttacgtgtattgatatcttttgtattaacccaaccgattggtgtgttttgatttgtattttggattaagacatatgtgttattgccttgtgtacgttgtttagtaacagtaaatgttttacctgagaatttagatgcatctttaccttttggatcataaactgttgttttaattccagaattagtagcatttaattgaccaatcttacttacagtttgtgtttgagttgctgctggtttcttagcagtctctttaactgttatatctccagtttgcatccaacctaaattagtattggttttattatcagtaattaaataaaatgcattgctacctaaagttgcttttttacttaatttgtatgtttgaccattcacatatgatttttgtacaccttgcttatcatatacagatgtatatacaccatgattagatttagcaactgtaccttgttgattagttaaattagatacaactaacttggcagtcgtagacggcttgcttggcgtcgtagatggtgctgttaatttacttaagctaacccatccagttaaattatttacagtaccataaatatagtttgttttaccaatttgttgttgcttagttgctttaaatgtttgagctgatttacctgaaacagaacctgctttttgactacttgttccccaaggaactgtataaatcacttctccaggattaattttataagttttattgatttttgcagcggctttagcggcgttataactcacatcaccttgatgtacccaaccaattaaagtgcctttgttatagtcagaaactaaatagtattgttctttacctaaagtagcagatttagtaactttaagtgtttggtttacacgatcagtctttttacctttttggtcataaacggttgtgtataaaccatcattttttgagttgatacggcctacgccattattttcagtaactttaacggtacctgattttgatgggggagttgtgcctgtgtttccagaaccagtgctaccaccagtaccacctgtactgccagaagaagtagtaccccatgctgctgcttgaccagttttaattaaatatttttcataaattaaatcgtaaagttcatcatagctataattatgtgctgctaagtaaccatgagggtcagagtggtcagaaccacctagataattgctgactgcttggtgagtccataccgtaccaacaccatcatattcagcactgtctgggactaaaccataatattgtaggttagttgctgcgtagtctgcataattatttattgaacgtgcaaaagagtcatagtcatgcgtatgaactaattcaacatgtataaaacgatcatttgcttgtggaccggcaccccatgctaagtagtcagtatttgcagtttcaataatacgatcaccatctacatatgcatgaacaaaagcgctcgtgtaattattcttcatatagttaatctcaccagtgatagttgaattatcattagcagtatcatgcattacaataccttcaggtttgccataacggtaattatattgaggtaagtaatttgctatatcttgttcgtaatttggtgctttaaaattatttttacgaatatagttattaattgatgaattaacttttggtgaatatttaggtaatgccgcacgtgttgttgcttctttagttactgcagaacgtgttgctactgcagtattagcactagtagtagctactctaagcttaggtgttacttttgcactaaatgtagctggctgtactttgttttctgctgtagaagcttctttagatgatgtagatactttggcattatcttgcttgtcattagaaacaacgtcatcttctttagaagttgctttgtcatcttgagtggcagattcattttgatctgctatatcagaagcgttagcgtcactatgagtgtcgtcttgtttatcactagaagcaacgtcttcattagaagtttctgctttatcattttgagcaacagattcgttttgatctgctatatcagaagcgttagcgtcactatgagtgtcgtcttgcttaacatcagaagaagcaacgtcatcttcattagaagtttctgctttatcattttgagtttcagattcgttttgatctttcacatcatcagaagcgttagcgtcactatgagtgtcgtcttgattaacgtcagaagaagcaacgtcatcttcattagaagtttctgctttgtcatcttgagtttcagattcattttgatctgctacatcagaagtgttagcgtcactatgagtgtcgtcttgcttaacatcagaagaagcaacgtcatcttcattagaagattctgctttatcattttgagtctcagattcgttttgatcttttacatcatcagaagcgttatcgtcactttgagtgtcgtcttgtttaaagtacgaagaagcaacgtcttcattagaagtttctgctttgtcatcttgagtttcagattcatttttatctgctacatcagaagtgttagcgttactatgagtgccgtcttgcttaacgtcagaagaagcaacgtcttcattagaagtttctgctttgtcattttgagcaacaggttcattttgatttgctacatcagacgaattttcatctgtatttgtttcttcagcattcgaactcacatcattagatgtctgtgatgcttcattagttgaatttgtttctgattgtattgagtcagtgttgttttcttcattctcttggttgttatcttcaacagaagtttgctcagtatctaaagatttcgtgtcattatctgatgaaacatcttgttgatcttcttgaacgtctgtttcctgattatatgtatcttgatttgatgttgttcagaagtt

SEQ ID NO: 45 - DNA, 912 bp, Staphylococcus saprophyticus
gaggtgagataatgctaactgaagaaaaagaagactatttaaaagcaattttaacgcatgatggtgaccattcttttgtttcgaataagacgctatcccaatatttaactattaagccaccatctgtaagtgagatggttaatcgtttggagaagtcagggtatgttgaaacaaaaccatataaaggtgtaaagctttcaaaggaaggtttaacatatacattagatatcattaaacgtcatagattattagaattatttttaataaaaattttgcaatataattgggaagaggtacatcaagaagcagaagtactggaacacaaagtatctcacttatttgtggagcgtttagataagttattagattatccaatcacatgtccacatggcggtattatcccgagagataatcaatataaagaattatatacaaccaatttattagcgtttgatactggtgatacagtgacaatcaaacgtgtacgtgatagaacggacttattaatctacttatcaagtaaagatatattgattgatgaacgtattgaaatcttgagtaaagatgatacaaataaagttattattgtaaagaaagatgagcaaattacagtattaagttatgacaatgccgcgcatatatacgctgaaatttaaatttactaatagccgtgtataacatagttgaaaaacataaaaaagcaaccgcctaaaaattgagcggttgctttttgcatgatagaaaccattttactgtcagaatgaaaaataggattgtagtagatgataaattgtaaatagattaatggcaatccatattaaactaaataaggccgttggcaaatgcgtgagttctttgagtgtcgtgccatcccatgagacattttgaagtgaaaatgttagcttaaaaatc

SEQ ID NO: 46 - DNA, 97050 bp, Staphylococcus saprophyticus
tgacgctgaatctgattcacttactgatgctgagtcgctcgcacttgttgacgcactatctgattcacttgtgcttagtgacgcactatctgattcacttactgatgctgagtcagatgcgcttactgacgctgagtcagattcacttactgacgctgagtcagatgcgcttactgacgctgagtcagattcacttactgacgctgagtcagatgcgcttactgacgctgaatctgatgcacttactgacgctgaatctgattcacttactgatgctgagtcagattcacttactgatgctgaatctgatgcacttactgacgctgaatctgattcacttactgatgctgagtcgctcgcacttgttgacgcactatctgattcacttactgacgctgagtcgctcgcacttgttgacgcactatctgattcacttactgatgctgagtcagattcacttactgatgctgaatctgatgcacttactgacgctgaatctgattcacttactgatgctgagtcgctcgcacttgttgacgcactatctgattcacttgtgcttagtgacgcactatctgattcacttactgatgctgagtcagatgcgcttactgacgctgagtcagattcacttactgatgctgagtcagattcacttactgatgctgagtcgctcgcacttgctgacgcactatctgattcacttactgacgctgaatctgattcacttactgatgctgagtcgctcgcacttgttgacgcactatctgattcacttgtgcttagtgacgcactatctgatgcgcttactgacgctgagtcagatgcacttactgacgctgagtcagatgcgcttactgacgctgagtcagatgcacttactgacgctgagtcagatgcacttactgacgctgagtcagatgcgcttactgacgctgagtcagattcacttactgacgctgagtcagatgcgcttactgacgctgagtcagattcacttactgacgctgaatctgattcacttgtgcttagtgacgcactatctgattcacttactgatgctgagtcagatgcgcttactgacgctgagtcagatgcgcttactgacgctgaatctgatgcacttactgatgctgagtcagattcacttactgatgctgagtcgctcgcacttgttgacgcactatctgattcacttactgacgctgagtcagattcacttactgatgctgagtcagattcacttactgatgctgagtcgctcgcacttgttgacgcactatctgattcacttactgatgctgagtcagatgcgcttactgacgctgagtcagatgcgcttactgacgctgagtcgctcgcacttgttgatgcactttgtgaattagatgcacttgttgatgcactttgtgagttagatgcacttgttgatgcactttgtgaattagatgcacttgttgatgcactttgtgagttagatgcacttgttgatgcactttgtgagttagatgcacttgttgatgcactttgtgaattagatgcacttgttgatgcactttgtgaattagatgcacttgttgatgcactttgtgaattagatgcacttgttgatgcactttgtgaattagattcgcttgtaggatccgtaacagtaactttttgaccattaaaaaagtcagttccaccagttacagatgtagaatatggatcaaacgtgaaagacttatctcccccagaattaatcggggctgtccatgtagttgttaaaccgtatccctgtttagcctgatatccattcatttgataaccatttgcccatgtataacccccaccttgttgaaccatgcttgttgtccccgcagctgggttactaacttttgcacctgttgaatctgtaatatagctcgttgccgatgaaggagttccatatccgttacctaatgtaaacattgtttgataagatgttcctgtattgtatattgaataattatttgttaatgtcgtcggtttttcaactgttgttgttgctggattatcatatgtaactgtataagtaaaagtcatagatgttccattattaacagtagtcaatttataatagatagggatattattatttgtatcggtacccgcacctgtataagtatttgtagttgatgccgttgcgaatgttgttgttgccaatctactaaaagttcttaattcaattgctgaggtactattagacgacgaatcactatcattagttacgattgctgaacctaaatcctcacttgttgcactaagtttactttctgtacttgcggaactgtctgtgctttctgtacttgcggcactgtctttgctttctgtactttcagcactgtctttgctttcttcacttgcagcactgtctttgctttcttcacttgcagcactgtctttgctttcttcacttgcagcactgtctttgctttcttcacttgcggcactgtctttactttctgtacttacggcactgtctttactttctgtacttacggcactgtctttgctttctgtacttgcagcactgtctttgctttctgtacttgcagcactgtctttgctttcttcacttgcagcactgtctttgctttctgcacttgcagcactgtctttgctttcttcacttgcggcactgtctttgctttctgtacttacggcactgtctttgctttctgtacttacggcactgtctttgctttctgcacttgcggcactgtctttgctttctgcacttgcggcactgtctttgctttctgtacttacggcactgtctttgctttctgcacttgcggcactgtctttgctttctgtacttacggcactgtctttgctttctgcacttgcggcactgtctttgctttctgcacttgtggcactgtctttgctttctttagtagatgtttgatcgcctacagttgtactattagaacttatttctgaagttaccggcgtttctgatgcagcaaacgcttgatgatcatttagcatattaaaagtaaaagccccaccaataactgccgatgctttcgaaatattttttttcatattgttgctattgctattcgcatttacgtcttctttatctgtaattttttgaccattgaatggtaaacccattgctctaagtaattgaatttctttaatgctagctttaatccaacttttacctgacttatacaatctcactcttgctttttcttctttaaaactttctttaaaccgtttgatttttttagtcataattccctccataaattgaatcatttgactgaaattttttatcactttaaccctatcattgccgctttttaaaagcaatataatttaacacaatatttctgcaagtaattaaatttgattcaacatttccatttgaaaatatttttttgtataaatttattttaaattatattttctacctaaatttcttattgcataccgttgatttttattggaattttattaattttattatcttatattaaaatatagttcctttgataaggataatccccatatttcattatgcttatataaagtgaaatattaacatctattactttctaaaaatttctctaaaacttcatcaataatagctttttagataaagttccgtaatgaggtactttatctaaaaagctatatcctaaataccaacggtaagctacatttgtttctatttctttattgtttgtctcattgatttaatgccaaacaacctttgtatgagtaatatttttactaaaataacaggatctatagatggtctaccattatcaaggtaatatttgtcttcgacaagttcatacacaaaatttaaatctaatatcgcatcgactttacgtaataaatgattattagggactaattcagagatagaaatcatttcatattgatctcttttatcaattgatttattcaacataataaacaccaccactgtttaatttacatatattataatatttttgtgtaatattggcagtaatttatgccgggttctgttgcatatagtgtagaagccaaaaaaccaaaagtagctagaatcccaaaaacaaacaaattttaaataaaaagcgcctaatacaaacttattaggcgctttatttcataaccattcaacacgtagcttagcacaaccaagaatgtgctaaaatcaatatatcattgtactaaccatttggcatttttctagtatcatgctattataagaatgtaaagaaaaggacaacatgcgctaacatgttgccctaatgagcccgttcgaaagacggtagcctaaattaattttttaaagaaataaccattaaccggctaaagttggatggttattttttttggttattgctaattaatactaaaccaatgattgttaaaacaatcatcagcatttcataatcagacatgctattcctttcttggagtagaaaccaaaaccataggcatcaccccattttcatgagattagccaccatctatccaacttgctcaaccaatattataacataatcccttggcctttttactagaccacattggacattttatatacgatcattacattaagttcgaaaaattaacaaaagcttctgatagctttacttattctctttaatcctttgaatcaaaaatttgtgacgttttatagcatgatcatattcctccaatagctcagtatccattaaatcaaaagttttttctatgctaccatttatatactctgatagaaagtttctataagctcgtcttctatcaatatcaccttgtttatatgagcttaacagtttatgaagatttaaaataaagtcttcattaacatcctcaaactttgctgttctatcaatacattcgttttctatctcaattattttcttatacttttcgtcataagttaacgttttatcttgcattatttttggcgtttcatctttagcaatttctcttataagtcctttaaacaaagaaaccatatcatatgcttcactactactaatcttagtcataacatcgaacctctttcactaatgtattttactttcaatgaacactaacaatattatttaatgaaagtcttacaatagattgattatctacacgcttgattagcataatactttctagtgtatctagtttttgtatataacaattcaaagcacttatatatccattttcccaataactaatttcagctattctattagtttgaattttatcatgcactttttcattaatttcttctaattggtcttccgaaagtaaaggcataggaattttattttgacccttaatatattgctctaatatttcatattgttcaggaatcgtcttaaaggcttgccacttgaccattccacgcccttttggaatttttgaatttaaatattcacgtggaattttacgataatccatttcatatttatatttatctggtgcattaggatttatcactttcaaaaaatcacctcgtaaatattatagaacatacgttcctattcttgaagtgaaatattaaaaggcctaccgcactcacgttgttcgcttactagagcatgaatataggtcgaactaaagattcagacctatattcacgctaaaaaagcctcaatagcgatataactaatccaaattattcttgaggtaaatgaatgaaattggtcgtataagcaattgaatgtttaggaatgagcgtacgtttctctaattcattatcttttggatctttgatgccatcacttttcactaataatatttcgtaagtatattctttaacaatgtaccccgtaaatgattctccattatttaaaacaactttcacttttttattattaaaaaacatatatggttgttttggataatcatagtctttgtaatgttttagtctcgctttttgtttattattcatcattttatttccctttgtattaataatttaatagttttctctctatacttagaataccaataatttccctttcttggctatattactagcagctacaatatcattattttgatgcctgaatccacattttgtacatttaaacttatttttattagttctgttgtactgatttctattatggcatattggacattcaatagacgtaaaactttcatcaacgatcagtatttcgtcattttcattttttcgctgcttaatcgcaaaataagtcaagtcaaataccaaactaggaaaagataaatggcttgaaccatgatcacctaatgcaaagacggtttgaaaacgattggacgtttgttctaacatttcgttaactacttgattgatatggtttttaagtcctgttttcagtttagaataagcttcgctattatcatattgcttattagcaatacgtctctcgtattttctaaaaagatggaagagcgtgttatgtttatcgacaaaaacaaaagatcgatctatatttgacgctgttaaataatggtatttacctaaatcgataccaataatatgagctttttcttgttttatataatcgttaatcgctttgatatgcttatatttacagttttctagcttttctggaaaacgtctataatagcttaaataccaattcggaacttgaatgaccctcatatcctcttttgtcatgtgaggtaaaaaacttttaactaacgaaaaattcatcgcctatcatccccccccttttttcttgtattttatgttttaaatacgttgagtggactgttttcaaagttttttctacgcatattcgttgagcgcatttcttctaattcggacaaaatagagcgcattaaatatgcttgcatggattcaacagtttcttgttttttaaccattatacctttgaatcttttaagtaccgttaataattcattatccatatcttcaagcatatacacttcaccatacaaatcattaaacgaacgcttagcttttagtataactgatttaataatttgtatttctttagcattaaagttattcatgtatctctttgtatcttcgggcatttcttgaagttctaaatattttaaagcttcttcatcggattgttgttgtaaatgattcgtatgatttggatgattaggttttgtagcttctacattttcttctcttacatcattcatatcattcgtatcactagaatcagtattactaatatcagtgtcattaagttcagtatcattagtgtgcgattttcgcatttcttgttgtacgatttcagcatttctagaaatgcgattttcgcaattcttgaaatgcgaaaatcgcatttcagtgtcatgacaagtctcatcaatgttttcttcttgttttttgatttcataaacgtcttctttagtaacttcaggattcattaaatataatttattaggtcgtccttgcccacatcttacttgttctaaaagattattttttgataactcttttttaatttttgttaatttaccatcatgacaatttaatatagctttaagtttttcatttgtgaaaatgaaaaatatatcgccattatcatcaaaccaattgttctttattgataattctaatctgtcttttaacaaagcgtacgcaattttagcatcattacttaattgcatatatttctcattagtaaaaaacacttttggcagttgataaaatttttctctatattgttgttggatattaaatctttcttcagtcataataaaaaacctctttccgtattttgatttggtaagaggtaataaaacgcttttatatatatttgtgtttatttactagtttcaatacttgcactaagtaacaattcagtatataatacaagtatcaaaacattgtagataaataaacgtggggaacgttttattaccaaacatttaagggcaactactaccaatagttgctctttttattttgttataaattaataataacacttatatacctatagaaacaatttattttgtaactttttattagtaacatgttacatgtaacaaacaacacaaagaatatataagaatgaattaagaacaacgagattatgtataagttgaaagaaacaagttttgcagtaacatgttacatgtaacaaacaacacaaagaatatataagaatgaattaagaacaatgagattatgtataagttgaaagaaacaagttttgcagtaacatgttacatgtaacaaacaacacaaagaatatataagaatgaattaagaacaatgagattatgtataagttgaaagaaacaagttttacagtaacatgttacatgtaacaaacaacacaaagaatatataagaatgaattaagaacaatgagattatgtataagttgaaagaaacaagttttacagtaacatgttacatgtaacaaacaacacaaagaatatataagaatgaattaagaacaacgagattatgtataagttgaaagaaacaaagttttgcagtaacatgttacatgtaacaaacaacacaaagaatatataagaatgaattaagaacaatgagattatgtataagttgaaagaaacaagttttacagtaacatgttacatgtaacaaacaacacaaagaatatataagaatgaattaagaacaatgagattatgtataagttgaaagaaacaagttttacagtaacatgttacatgtaacaaacaacacaaagaatatataagaatgaattaagaacaacgagattatgtataagttgaaagaaacaaagttttgcagtaacatgttacatgtaacaaacaacacaaagaatatataagaatgaattaagaacaatgaaattatgtaggagggttattttgaatataataacagttggaaattttaaaggtggtgtaggtaaaactacagtatctacattactttcttatattgcatctgaaaactataacaaaaaggttcttttaatagattttgatcctcaaggtaacgctactcaaattatgaaaagaacttatccagaatttaaagaagaatcactttcattcataaatatgctaaaaagtggaaatatagatgaaagtatcattagattaacttctaatttatcattattgcccgctgattcgtctttggctaatttatccgatattatttcaaaaacagacattttgaaaaaaagatatattttaaaaaatgtggtagaaaaaattgaaaaaatttatgatttcgattatgtatttatagatgtgccacctactataaattcagattttactaataatgctgtttacgcaagtaattatattttaatggtatttcaaacacaacaatcagcttatgagagcagtctttcttttgttaattttctaagagatagaaaaaaagagtcagatttaccatttgaattagttggtgcagttccagtattaataaaaaaaaatggacgagtagataaacaaatattagagatgtctaaatctgcgttttctgaagcattatttgaacaccaaatatatcaaagagaaagaataaaaaagttcgctgctgatgggataaaagataaagatatgcatgataaaaaagtcatacatatgttcaacaaagtatatgaagaattagttagtagaattaaattaattgaggaggaatgaaatgtatggctggatttttagataatatagatacttcggaagtgaaatacacagagaattatagacctatatctaaaagtacaacaatgagagtagatactgatattaagaaaaggctaaaccaaatggcgttagataaagatacgtctataaaatcaataattgataaagttttagaagaatttttagaaaataataagtattaaaaagttaatttatagtaatttttcaaataaagaaaatgctaaaatgcgtcactatactagtgacgcattttttgtaacttctgataatcatcgattatgttaataaatgcaaaatcaaacagaacttttttaatgttagcaacaatttttattaccgttttcttttttctcattattttcgtcttttttgtctgttttctcttcaatttcaactgaacaacatgactgttcttgaggttttaatttttttaatgcgtctttgatacccatttacttcacctccttaaatgattaagttaacaattagaccagtagcaatagctacgactaaaattgctataacaaaagatattacaaatttctttttaaataatttagataacaatacaacttcaggaatacttgctcctgcgccacctataattaatgctacaaccgttcccaaagacattccttttgaagctaatgctccggctataggtaacatagtttcaggtctaatatacataggaatacctattactgatgcaatgagtacggatatactactatctccacttgcatatttagtgataaacgtttcaggtacaaatccgtatataaaagcaccaataaacacaccaataaataaataaggaagcattggatataagaatgcccaagcatcatttaatgcatgtttaacacgagatccagttttattagcaaaaaatccatcgcctttaacgtttacacctttgtaagttttagctaaattcatttttgaaaatactagacccattaaaatactaaaaatcgctagtacaacaaagtaaataacagcaactttccaacctagtaaactccataacataaatatcattaatggattcattaatggcgatgcaatcaagaaactcactgcaggaccaaatgcaactttagaatttaataaacctgcaagtataggaattgttgaacaagagcaaaatggtgtaatagcaccaaaaatcattcctaatatatagttggttgctttatttggtttgcttaaaagcttttgtattttatcttctgatactacttgttgaattaaacttacaataaaacttacaactataaataatgctaacaattcaaaaaataacattaaaaatgtttttatgaattctatgattgaatctgtcattagtataactcctctgaatttatttaatcaactttttttgatatataaattaaaaaaagttgattaatatgatgtgtaataagataaatcctataatattttacagcaagtatcttcatttaaaacaatctgtatttgtgcttcattgattttgtagtagttccaagtaccatatttttcaggtattaaaatctgtgcacttactaatttttttaaatgataagaaattttagattgttttaaatctaataacgcttctaaatcacacacacataatgatttattagaactctggctaatttgatttagtattttcaatctgtttttgtcggcaagtgcattaaacatgttttcataaaaatctaattgttgatcttcattcatatcagtttttgctttaataacttccataaaaagaacacctcttttttataatatttgattagagtttatattatttttatttcaattcttgtattgcttgtttgtagttattttctgttgattcaccatactgatgaatattacctttaaagaactccttctccatatatattgtagcttcttttaaagtgacttctcttgataccataacaagatttaaataacttacaaagtaaccaacagataaagtacttgcgtggtttactcgcaatcaggcacacctccttattgtctaaataattttattccatttaatatatcaattttttttgatatattaaatataaatcaatatatacattattgcaagattaaaaaactataatttcacataaacttagacatgctccacagcaatagtaaaaatattttcttcctaactatattattagaaactcaaattaagttaaattttaaaaatccaaatcaatacatagacactaatctatatagatgctaatctatggtagtaaaataattaatgaggtgagtataatgttaaatattgaaatatacgaagaagctatgtgctgttctactggcgtatgtggtccagaaccggatgaaacactaataaagacgaaccaaatcaatgaatatttaaaacaaaatcaaatagaagttcaacgttataatatgagtaataatccgaatgaatttattaaaaataaagaagctattcgtttaattcaagaaaaaggtaatgaagttttaccaatcacttttatagaaggcaatatagctaaaacgggtacttatattacccaagaagaagccgatgaaattattacggttaatcagatgagaaatggaggatgctgtggtggagatggatgctgttaaatacttaaataaattgaatttagataatgttgagttaacaaaatatttgttttttactggtaaaggtggcgtaggcaaaacgacgatatcaagttctattgctttaaacttagcagagaatggaaagaaagtagctttagtaagtactgatccagctagtaatttacaagatgtatttcaaatggaattatctaataaattaactacatatcaacctatacctaatctctctatagccaattttgacccgattgctgctgcagacgattataaagcacaagctatagaaccttatgagggtattctaccagaagatgtgctttctgagatgaaagaacagttaagtggttcgtgtacagttgaagtagcagcatttaatgaatttacaaattttttatccgataaaactttagaacaagaatttgatttcattatatttgatacagctccaacaggtcacaccttgagaatgcttgaattaccttctgcatggacagattatttaaatacaacgagtaatgacgcttcttgcttaggtcaattatcgggtttaaatgaaaatagaggtaaatataattcagcacttgaaaaactacgtaaccaagacgatacgaccatgatcttagttgcgaaacctaaccactcttctatatatgaaattcaaagagcgcaacaagaattacaacaactatcaatttctaaattcaaagtaatcattaacaactatatagaagaaagtcacggtttaatttctaatcaaatgaaattagaacaagataaaaacattaaccattttaatgaatggttaaataacaatcatgccttttacgttccatataaaaagcagaaagcagaaggtatagaaagtttatctaatctattaaatgatgataatttaattgaaaatgataactttattgttgaagaccatccacaattcaataaattaatagatgagattgaaaatagtgaagtacagtatttatttacaatgggaaaaggtggcgttggtaaaacgacagtagcaacgcaattagctacagcattatctaataaaggacatcgtattcttttagcaacgactgaccctactaaagaaattaatgttgaaaccacaagtaatttaaatactgcttatattgatgaagaacaagcattagaaaagtataaaaaagaaatactagccacagtgaatgatgatacaccacaagacgatattgattatattgtggaagatttaaaatcaccttgtacagaagaaatagcatttttcaaagcctttagtgacattatggagaatcaagaagacatggattacgtaattgtagatacagctcctacaggccataccttgctgttacttgattctagtgaaaatcatcataaagaactaaagaaaaaatcaactcaaactaccagtaatgttgaaacattattacccaaaattcaaaataaaaatttaacacagatgataatcgtaacactagcagaaaaaacaccttatttagaatctaaacgtttagtagaagatttaaatagagctaatataggccataattggtgggttgttaatcaatcgttagttacgctaaatcaacgtgatgacctttttagtaacaaaaaagaagatgaatcaatttggataaacaagattaaaaatgaaagtcttgataattattttgtcataccttatggagggttatcataatgaaaaaaattgtaatcattggttcagttgctgccggtacaagtgtcgcggctaaagcaagaagaaatagtgaagatgtggaaattaccgtttttgataaagatagtgatatttcgtattcagtatgtggtattccctactatataggcggtaatgtatctgatattgatgaactcacgccacgaaacgctaaatggtttaaagagcgctttaatatagatatttatacaaaatatgaagtgaatcagataaatgatactgatcaaacaataacagttaccaatttagtaaatgatgaaaagatgattcaagaatatgacgaattagtattagcaacaggttcatcgcctaaagaacttcctcaattaaatagcgaagaatataacaatgtgtttaaagttaaaaatattaatgatgcgaaagcaatttataattatattgagggcaatgatgttcagaatataacaatcattggtggtggatttattggtctagagatgttagaacaattatctaattacaatacttcaattgttcaacgtagtacttttatgcctcatttagactacgatatcagttttatgattcaagaatatattgaagataaagctaacgtatatacctataatgaaatagatattattgattatgatgaaaatcatacgataaatagagtgagattaaaaactggcgaattaattgatacagatttaatcattattgggattggtgtcacaccaaatactaaattagctaaagaaattggtattaatattggaaaatctggagcaatacaaaccaataagtattttgaaacaaatattcctcacatatatgcaattggtgatgtagcagaaagttataatttaattactggtaaccctatatatagaccgctaggttctacagcaaataaaatgggacgtattttaggagatcgattaactggtggaaatctagaacataaaggtattttaggaacaggtattgttcgtatatttgatatgacaattgcccaaacaggcttaactgaaaaagaagctattgatttagatattgatattgacgtattacacaatgtgaaaccgaatcgtccagaatatatgcaaggccaagaaatggtaattaaagctatatttgataaaaacaattctaaattacttggtgcccaaattattgggtatgaaggtgtagataagagaatagatgtactagctactgctataacgtttggtgccaatccagaagatttatttcatttagatttagcatatgcacctcctttttctacaactaaagatcctgttatttatacagggatgattggacacaatattactcgaggacgcaaaattataacgcctgaagaagttataaaacaaaataatgatttattgattttagatgtacgttctccaaagcaatttgaagttgatcatgttgatggagcgattaacgtcccattgaaaacgttgagaagttatgcaaaaacattagatgaaaatcaaacaatcgtgacttattgtaataaaggtactactgggaatgctgcacaaaacgtacttattaatttaggttttaaacaagtgtttaatttgtcaggtggtaataaaaattatcaacgttataaaaggtttcaagtagaaaggaagaagaaaaattgaattataaagaaatatcacaatacttaaaagtgattgctgatagtagccgtcttgaaatattagatttgttatcttgtggtgaattatgcgcttgtgatttattagagcatttttctttttctcaacccacattaagtcatcatatgaaagtattaaaagacaataatttaattacatccagaaaagatggtaataaaaatttatacaaattgaatcatgacgtattagatgacgttacatcacgactgactctattgggttccagtacagtcccatgtatatgtgaaacagtagagaaaggtgagtgttaattatgatgatattagcaatcacaatatttgtattaacgttaatttttgttatatggcaacctaaaggtctagatattggtattactgcattaattggtgctgtagttgctataatcactggcgttgtaagcttttcagatgtactagaagttactggaattgtttggaatgcgaccttaacttttgttgcagttattcttatttcactcatattagatgaaattgggttctttgaatggtctgctatacatatggtgagagcatcaaaaggtagcggattgaaaatgtttatctttatcatgctattaggttcagttgtagcagccttcttcgcaaatgatggtgcagctttaatactgacgcctattgttttagcaatggtacgtagtctaggttttgataaaaaagcgatatttccatttattattgctagtggttttattgcagataccacatcattaccacttattgttagtaatttagttaatattgtttctgctgattactttgatattggatttgttgagtacttcagtaaaatgattatacctaatatattctctctgattgctagtattctcgtcttatggttatattttagaaagtctatcccaggaaaatttgatgcagtaaatattagagaaccaaaagaagcgattaaggacaaaaagctttttaacatctcgtggattgtactcactgtattgctagttggttatttaataagtgaatttataaatattccagtatcaattattgctggtatcattgctttaatatttgtattattagcgcgtaaatctaaagccgtgcatacgaaacaagtaattaaaggtgcgccatggaatattgttttattctctattggtatgtatctcgtcgtatttggtttgaaaaacgtgggcattacaacacttcttggtgatgtactaacaaacatttcaagttatggcttatttagcagcattatgggtatgggctttgtagctgcattcctatcctctattatgaataacatgccaaccgttttaatagatgcaatagcaattggtcaatcgagtgctacaggaatattaaaagaaggtatgatttatgcgaatattatcggatctgatttggggcctaagataacaccaattggttcgttagccacacttctttggttacacgtactaactcaaaaaggtgtcaagatttcttggggaacctattttaagaccggaattattatcacaatccctgttttatttgtaaccctattaggtctatatttaacactaataattttttaaaagagaggtaataataaatggataagaaaacaatttactttatatgtactggtaattcttgtcgtagtcaaatggctgagggctggggaagagaaatactcggcgaagaatggaatgtttactcagcaggtatcgaaacgcatggcgtaaatcctaaggcgatagaagctatgaaagaagtggatattgacatatcaaaccatacttctgatttaattgataataaaattttaagacaatcagacctagttgttacactttgtagtgatgctgatgagaattgtccagtcatcccgcctaatgtaaaaaaagaacattggggctttgatgacccagcaggtaaatcttggtcagaatttcaacgtgtaagagatgaaataggtcaaaagatcaagcaattttatgataattaagttaatataaaattcaaaaacagaggataagcattgttatatgtgcttatcctctgttttatataatgatatttgctgcttacctttttctgttagttctgcatatattgttgtgccacatataggaaaacacccattgtagaataactctatattttttgctaaatcttgcctcgctatgctttcaagtgctaataaaaaattttttcgcttacatctaaagttttaaaatctacactttattcttctctaatcgataacagtacattatacactaaatcttgttttaacaacgttcatcacctcttatttatctagatgacgatacaaggttgctctacttatatttgtctgttcttttatctcatctaaagtgtattttttgctcatatacatctcaatagcatctctaaggttattatcatcgcgtttgggtctacctaaagtttttcctttttttgcgtaattttctaatcctgctcgtgttctaaatttaacgatgtcactttgaaagtctgtaatattatgtaatatttctagaaattcccctttgatatctttataaatatatcgatttaaattgattacatataaagatatttcctcttgtgaaagataatctaatatatctactaaatgcttcgtagaatctgcaagtatacataaatccgtaatatataacttatcacccgtcactagtttcttgcttaaaagaacatctaattcatttctatttttattattagcatgaatttcttcaacaatttcatttgtatgggtttcgattttctttttttgttcgtttttgagactagaattttatgccctacttacttcttttattttcattcaaatatttgcttgcatgatgagtcgaaaatggttataatatattcaaataaatatttgaatgaagatgggatgataatatgaaaaagaaagatacttgtgaaattttttgttatgacgaagaaaaggttaatcgaatacaaggggatttacaaacagttgatatttctggtgttagccaaatgttaaaggctattgccgatgaaaatagagcaaaaattacttacgctctgtgtcaggatgaagagttgtgtgtttgtgatatagcaaatatcttaggtattacgatagcaaatgcatctcatcatttacgtacgctttataagcaaggggtggtcaactttagaaaagaaggaaaactagctttctattctttagatgatgaacatatcaggcagataatgatgatcgccctagcacataagaaagaagtgaaggtcaatgtctgaacaaaaggttaaactaatggaagaagaaatgaacgtctatcgggtccaaggattttcatgtgcaaattgtgcaggaaagtttgagaaaaatgttaaaaagattccaggcgttcaggacgcaaaagtaaattttggagcttcaaaaattgatgtcttcggcagtgcaactgttgaagaactagaaaaggctggtgcttttgaaaatcttaaagtggcaccagagaaacctaaaagacgggtagaacctgtggtaattaaagataaaaacgtttaccgtgtggaaggattttcctgcgcaaattgtgcggggaagtttgaaaaaaatgtaaaacaaatagctggagttgaggatgcaaaagtaaactttggcgcttctaaaattgatgtatatggaaatgcatcggttgaagaacttgaaaaagcaggtgcttttgagaatctaaaagtatctcctgaaaaactagcgaatcaaacgatacaaagggttaaagatgacactaaggctcataaagaagagaaaacaccattttataaaaaacatagtacattgctgtttgccacactactaattgcttttggttacctttctcactttgtaaatggagaatataacctcgtaacttccatgttatttgtaggttctattgtaattggcggatattcattatttaaagtcggttttcaaaatttgatacgctttgatttcgacatgaaaaccctgatgaccgttgccgttattggagctgccattattggtgaatgggcagaggcatctattgttgttattctctttgcaatcagtgaagcacttgaacgcttctctatggacagagcaagacaatccatacgttcattgatggatatcgccccaaaagaagcactagttagacgaaatggtcaggaaataataatccatgtggacgatatcgctgtgggtgatatcatgattgtcaaaccaggggagaaaattgccatggatggaatcattgtgaatggcttgtcggctgtcaatcaggcagctataacaggagaatctgttcccgtctccaaagcggtagatgacgaagtatttgcaggtacgcttaacgaagagggactaattgaagtaaaaatcaccaaatacgtagaagatacaaccattgccaagattattcatcttgttgaagaagcacaaggggagcgtgctccagcccaagcattcgttgataaatttgcgaaatactacactccgatcattatggttattgcagccttggttgcagtcgttccacccctattctttggtggcagttgggatacatgggtttatcaaggattagcagttcttgtagttggatgtccttgtgcattagttatttctactccaatctcgattgtctcggcaattggaaatgcagcgaaaaaaggtgtgttggttaaaggtggtgtctatctcgagaaattaggagccattaagacagtcgcatttgataaaacaggaacactgacaaaaggtgtaccagtggtaacagattttgaagtattaaatgaccaagtggaagaaaaagagctattctctaccattacagctttagaatatcgttcacaacatccacttgcttcagcaataatgaaaaaggcagagcaagataatatcccttattctaatgtacaagtggaagaattcacttcgattactgggcgaggtataaaagggattgtaaacggaactacttactatattggaagcccaaaacttttcaaggaattaaatgtttccgattttagccttgggtttgaaaacaatgtgaaaatcctacaaaaccaaggaaaaacagccatgattattggaacggaaaaaacaattctcggcgtaattgccgttgcagatgaggttcgtgaaacaagtaaaaatgtgattcaaaaacttcatcagttaggtatcaagcaaacaattatgctgacaggtgataatcaaggtactgcaaatgcaatcggtacacatgtaggcgtttctgatattcagtctgaattgatgccacaggataaattagattatattaaaaaaatgcaatcggagtatgataatgtagctatgattggcgatggcgttaatgatgctccagcacttgctgcatctactgttggaattgcaatgggcggtgctggaacggatactgcaattgaaacagctgatattgcattaatgggagatgatttaagtaagcttccatttgcagtaagactcagtcgaaaaactttaaatatcattaaagctaacatcacttttgctatcggaattaaaataattgccttactattagttatcccgggatggttaaccctttggatagcgattctttccgatatgggagctactattttggtagcattaaatagtttacgactgatgagagtgaaggataaataggtagaaaacagaatagtaaggtcacgctgtgcgcaattcaaggggggcttttcaatttgaagaaaagtcctacccctaaaatataaaatgttggagatggaaaaatgatcgcaacgatacttacagcagctgcggtatatgtagcaacaggaattgattatctcgttatattaattcttttgttttcgcaagtaaaaaaaggtcaggtgaaacatatttggataggacaatatatagggactgcaattgttataggagcaagtcttttagttgcacagggggttgtaaatttaattcctcagcaatgggttatcggactacttggacttttaccactttacttaggtgtgaaaatgtggattaaaggagaagaggatgaagatgaaagtagtattttatctttattctcctctggaaaatttaatcagttatttttgacgatgactttcatcgtattagcttccagtgcggatgacttttcgatttatataccgtacttcacgaccttaaatatgtctgaaatctttattgctgttattgtctttttgattatggttgctgttttatgttatgtcagctatcgcttagcttccttagattttgtatcagaaaaaattgagaaatatgaacgttggattgtacctattgtattcattgggttagggatttatatattgtttgaaaatggtacatttaacgctttattctcatttctttaacaatcggaacgctttctctaataagaatcagcgctcgtttgacatataagaccgccttttgggagtcacgatagaagtccaatttcttaattttagaactgagaaattggacttctatatacctcctgactctaaccttattaacttgtaatgcaaaataacgattaaaataggtgcaaaataactcctaaagtgacaagctaagcatatcaatacatatataatgtctatttagggtctacccaaattagacatagctaatttaaattaaaacctgtaaatatttaataaacggtcgtttttaataaagttcacccaagtcatatggtagttccctttcactttccactcatttttgtgaaaagcagtacttgggacacaatggcaagtataggcaattcaatcaaaggcccgatgaccagagtcaaagcaatgagaggttgatttggaaaagcggtgacagctatagccaaggcaactggagaatttcgtgcaataatcgtcaaacttaaactgaccgtatcttcataggaaaatttcagtagtcttcccactaaacggcctaacacatagttgataataaaaaatatcaaaataggaataatcaagatataaatgacttccaaatggtcaagcaagtatgagccttgggaagcaaacattgccataatcgcaaatgatagaaagaaaatctgagcattgctgaaaaagggtatgacgatattgcttaaaactagttcttttcttctcaatagaaatcgtgtaaggtgagcaagcacgaaaggaaagatcagtacaatcaatatactctcaatgagtgttgggagaggaatggtttcaatgctgccagcgaataatagtaggtatataggtaaaagtacgacttgcaggatcaaattgatcggtagaatcgatgttgaaagagacacattcccttttgctatgcctgtaaatgcgaggtaccaatccgtgcaaggtgtcaccataagcataataaaaccaatccataaagctggatgatctgataagaaaatagcccccaacccccaggctaatactggtgtccatataaaattaatgatagtactggagccaaggaatctgatatttaaaaatgcctttttcaattgatgcagtggtatcgtcaaaaacaatccatagagcattaagaataaaaacgggacgaccagtgtctctgcatatcgttcaattacacctatttgtcctaataagatacctgaaccaacagcgagcagtataatcaaggtttgaaacttttctaatattccgataaacgcacctcttttccatttgaaattttttataagatgaacctttctgcaaaccagtataagatagtctatcaatgattgtcttgagtgccaattgaagtaatagaaaaaagataaatttggtggtactcatcattacgaatatattgacaatagtgctaaacatttttaatatatgagtatatataaatataaccatatttatattaagagctaccattatgattagtaagaggtgagccatcataaaagatattaacgaaaacaaaattgttggtaataaaaaaggtcttgatgaagaaactttatttgttgtatcccaaactttcaaagcattaagtgatccaacacgaatcagaatactgaatttgctgtttcttaaagaatattccgtaaatgagattgctgaaaacctacatttaagacaatccaccgtttcgcatcaattacgctttttgaaaaatttgcgcttggtcaagtatagaagggaaggtacgactctatattattcccatgatgatgcccatgtaatgaacatgttgaaagaaacaatcaaccatgctcgtcaccattgaccaaaaaattatataaacccatctattatacccatctataaatattaataggagatgattgaatgagtcatgaacataaccatacacatggtgcgaacaaaaaaaccttgatgatcagtttcataatcatcacaggatatatgattatcgaagcgattgggggaattttgaccaatagcctcgccttactagctgatgcgggccatatgttaagtgattcaatttccctaggtgtcggtttgttggcttttatacttggagaaaaagcggccgattatagtaaaacatacggatataaacgatttgaaattcttgcagctgtatttaacggagttactctggtactgattgccatctacattttctatgaggcctatcaacgttttacagatccacctgaagtcgcctctacgggtatgttaatcatcgcaactattggactactggtaaatattcttgtagcatggattctcatgcgaggcggggatacgaaggaaaacttgaatatacgtgcagcatttttacatgtgataggcgatctgcttggatcggtgggggccattattgcggctctgatgatcctcttcttcaactggggctgggcagatccgttggccagtgtgattgttgcagtgcttgtattgataagtgggtggcgtgtgacaaaagatgccgttcatgtattgatggagggtacccctaaaaacgttgaaattgacgcagtgattaaaaccatagagagcattccaggagtaaataatatgcatgatctacatgtatggagtattacaagtggccaaaatgcactttcatgccatgtggtggtagatggtaccatttctattcaggaaagccaggaaattctgagaacaattgaagacgagttggaagatgagaatattggacatgcaacgattcagatggagagtgaaaaccaccctcataaggattctgtaatgtgcagggatgatgatattacgcatagtcatgaacactaaaaaatagaatataccactataatgatcaaaaatgttagcaagataacgattttgacctataaattgaagatttttaatgtatacgattttattaactgttcatagtattagatagaaagaaaaaattcgagcttctgaatatcgtgaatcgattaatctgcattctcgttgggcggttaggtctagtgatctcctacaagccattaatgaggtgaaacctcatattatccattttagtgggcatgggtcatctgaacatgacatcgttttagaaactgcagaaggcaaaccgagttttttatctaaagaaaaagtgacccttttaatgaaaaccatgtcagagtccatcaaattagttatctttaataattgcttttccaacggccaagccgaaatggtgacagagcatgttggttttgctattggaatgaatgaagcaattcaggacgaagcagccaaagaatttgctgcacagttttattctgccctaggatttggtcatactgtccaaaaagcatttgaacaaggcaaattagcgcttagcttagaaggaattgaaggggatgaaatacctgaactctattcgagagaagggttagatcctaatgagcatatattggtaaaaccggacttttaataaccacttagtaaagtaaaaaaagttactttacatgccctcaccgattggtagttactaaaatacaaggtatggctgatgtgaatagattagtatcagccatacccttttataagaagagactttataccatcaatattcctttacgtaacaattcgaaaatcttgtccaatttcgggcatatgtctatctctccaaatcagtgcagctattttcttgtaaactttgatttttaaaaggaaagtgtattaatccattggtatcttgacgattttatatttgaaagaccctgaatcgagctaaaaagttggtaatagacaaaaggtaaaactaacaagaaagtaaaaggtttaattggataatttaaagaaaaaatgttataatcacattaacaaatagaatgttatgcatgaaacaccgaacccccaatctatgtcagtagattgggggttttatatggtgtattggtttagtcatctagtcatttatcacgactgtccaaccaataagcgaacaatgtgatgattacaccaacaataatgggtgcaatcaacaattcaaatagaatgctatgcatgatgtcacctccttccatgctatcagcacagaagttaactagatgaccgttataattctatcacatcacctaatttaaaagaacacaatgtcttatcagataagtcaacttaactcgactatacagttgctccctcgattacaaatttataaattcgcaaaagaaataaattactaggggaagacgtttatcactttaaaagatggtttacatcagtttaaagctttattttgcataggattttaagagaccagtaacctctgcattaaggttactggtcttataattttcctccatactttaaaaacttcttctcttctggttttagatgatatttaatgtgtaagtctattatcaattcttactttcatttcatttattacttctaaatcaagatcatctattagctcaaataccatttctaacttcctattttcatcaatagtaagtaaatctaatatgtccattaggctctcttcttcttcattttcttcgtcatcaaaacctttctgatgatagttatttatatcttcttgataacttttatgaccaaatttttctctattactatgatacaagtttccaagtaattctctatatcgtccatcactaggactagtcaatagagcagtaataatttcattgtagttgttaaaggtcaatagcgaaggatcttttattgcaaagtcataaacgtactttaaaatatcctctaaattatcatcatcaatgtttaaccccttaaagattgttttagaggacagcggttcgcctaatactggacttgcggtaagagacaaaaattcacctaatcccgcacttgtgttaaaccaaccaacttctttacatttttctaattgtaaattgatttcttctgttaattttctaagcccataaagaaatgatttttctggattgttttctatctgatatatacgtgctactatgccactattttttgactcataataatcaattattgtacttggcgggtctagatcccaatgactcataaaatagtattcgtcaaacttactctcgtaaaacaatggatacctaaaaatatccctcttattcttatgaatccaaaggacattcttatacttttccagcacctctaaaccgagttctgtaagaacaaaacaattcttatctgtattattaccgatatcttcatcagttgcatgtctctttattctattaattagtacatctcttgtacctgacaccgatttagccattgatctaagaataaccttcaactctgcaactgttaaatgcttcaatatttccataggtagatttgctcttatcaattcatttttttgtaactttgaaacaacttggagaaaatcaagaaatatatatctcgctttgaacctttctatcgaatgtgtatgaccagaaaaggtttgcaaaggagcatttacaaaagtgggtctcttatttaactcatgtaatacaagaatatctgcaactttatatttactatcatcgttttttattgcgggtgggctaaatttcaccataacaatactccttatttttttaatcgcagctttcacaatcgataatatgctgattacatattataaataatagcactttcttagattccatattcataccccacacagtccaagtttacataccattacttataagcagtcaacgaaaataagaagggtagaagatgccaacttagttgcatcatctatcccttttaatacagaaaagtatatgtttaggaatggtttaaaagcaattctgaaaacagctgtttatatcactattatcttataaattatggtttaactgaagtaagggatgtatccgtaagttaatctaaaactagcgactttttaattgaaactatgtaaaaagatgggacaaagtggctccatttgacgatattttaagcccgacattcgtaaatgcaaagaagtacagactatcacctgcacttcttatttattctacagtaatcagacgtttttccatgagttatatatttgagttcttttattaaaggcttcttgtccaccttccattatatcaacaattttttgctgaatatccttgttatcgacactaccagtttttgcgcttagttgtttttcattataagaaacagcaattacctgttctgagtcgccaaggactgggatatttgcattgtgtgtcgcaaatataaactgaacctctggctttctttcttttacttttgtaattatttcattgtaaattatttgattgtctagatcatcttctggttgatcaatcattattaaattattgtctttttgagataaaatgaaaagaactaaagctgacgctctttgaccgatagaatgtttagttataggttttccatggtactgtatttcaattttatttggagttctaatttttaattgttcattgtaattggctttaattatctcttttaccctagataattgagcttcagttactaaagaggaagttactttagaatcatctaataaaatatcaactattagtgctgagaaatccgagtgattttcgcttatggctcgataagtactttggtttatattagaacctttaaatgattgcttcaagttttccagaaaggattccttgtttcctttaaattcaatgcttaattccaacgagccctggtttgaattgatcttttcaatttcatcattgtagactctgaattcttgcaacaacagctgattcctttcctccaagtcagcccgaatcttagattcaatttgatcctttgtttcttcttgtgtgttgacttgatgaatatcctttcttatcttatcttcgttagtcttaagcttcgcaaaatcatcaggatttaagttgggtatatcgatatccctcttaatttcagcaaattcttcctcaagtgaacctatgattgcttgaatctcttctagatacttttttacttgctcagaacttgaatcgacctttcctataatctcttgaatttctttttttacagcaattacagaagttacttctttcgataaatttgagaacagctctggcacttctaaagattcttgtttacataattcatcgagctctctgaggttaggagaattcagtaaaagtttcaaatccttcttgaattcattgatccgatcataggtattttcaatacttctttcatccttttgaaaattcacttgtttagaaagcttagtgttcaaaccattttcttcaaatattcttatcttatgttctatatctgttaaacttctgttaagatctggcaaagtctcaagtttatcattcaactgaaatagctgattaacgtggtttcccaattgatcgtttatattagttaaatctctttcaaagaactttattttcttcccaactaatttgcttaatagatctagttcgaatccattttccatataagataaatctttctgaccgaaatatagtggagtttgaagaatagaatttacggttactccgatttcctccccatcttcatcaagtacgtgagaggactcccctagtattctttttactttgtaattctttttgtgattatcttgaatttcaacaatcacttgcccacctgattcaagaagattcttcaccacttcagttttatagttttcatcagttatagatggcatcatatctaaacaatatctaatagcttcaattatacttgatttaccactacctcgaattccaattaaactatttaattctggcgataagtaaatcttttggttgttcattttgccaccgatcatttcaacggactttatatgtccatggctatgattgttttccaattgagaaattcgattttgataatccctcaatgcaagtatgacagaatcgaaacttccatcgccaatctttatatatgattttttccctttacctatctcctcaatggacttacaatctgaaccttcaatgtagggtaatctatagcccatccacctttcaagttgatgcatcttatccctagtttgacctttttgaaatgcaataactttgtctttaaaccaactatttttactaagagattctattagacctccattgcattcttttaaaaatccacttttttgttcgatgtgggccatcaagataacatagtctttgttataagagtttaaggcttcaaccgttccagccaaatctttgttgcaacgtgtattttcattttctctattttcgattcctttgaatacttcgtcgaggaattgatttatagattcactattgcccttaatccagtcttcttctttaaaaactattaagcaatggataccattagcaccttctttaacagagagctctactccgggtagtaaagtaatgttttctgttctcgcttttttcttcagacccttgaattcatttagatgaaacttgttgtgatttgtaataactcccaatttaatattttcttctttgagtttctttatgtaatcgctcacaaaacgatcctggtctcccttataaataaattccttatctgcgttagtgtgtagatgaaaatctgctcttatccactccgtaccaaattggaacatagaactcctccaggtttttttataatatcgctctaacctttaataaaatatacttattactctcatagtagcatatgacgtagtttaaaatgctaaatttaaaaactagagtatggttttatttgagatagtaaaaccgttcaattaacgaccgtttttgacacaaaacctcttaacttaataataagaggtttttcttggatatttaagtctataaacttgtgttataatcaatgtattataattctcgaaaatcatgagtttttagacgatgagagacgcgtttatttgcatcgagaactagatttcattagtaagtactcataaaacgattaaaagaggtggtattcaaatggctaaaattggttatgcacgtgtatcaacacaagatcaaagtcttgatggacagattgatacacttgaggaatatggttgtgaacgtatctttagcgagaaagcgagtggtcgcaaaacgaaaagaacggaacttgataagtgtttggattatttacgggaaggagatattctagttatctataaactagatcgtcttggacgtacaacgaaacaattaattgagttatcccaatggttcgatgaaaacagcattgatttacatattattgatatgaatgtatcaacgaaagatgcgatgggcaagatgttctttactatgatgagtgcattcgctgaacttgaagctaacttattaagtgaacgtacgaaaaaaggattagaagcagcacgagcaagagggcgaaaaggcgggaggccttcattacctgaccataagaaaagagaaattaagtttctatacgatgagcaaaaacttacaggagaagaaattgctaaacaaacaggtgtaagtcgttctacagtatataggatgcttaaagattaaactctatgaaaaaatatattacttaaggctcttataggtgtatctaaatcattttatgaacattgattttatgttgagtttttgaacatattatatactgatattcatagattttggattatgaagaaagagtgtacagaaaacagttattttctgtacactcttgtataaaaattttggttctgttgcaaagttagatttatagtataattttaacaaaaaggagtcttctgtatgaactatttcagatataaacaattcgataaagatgttataactgtagccgttggctactacttaagatacgcattaagttatcgtgatatatctgaaatattaagggaacgtggttttgatgttcatcattcaaccatttatcgatgggttcaagagtatgcacctattttctatcaactttggaagagaaaacataaaaaaacgtattataagtggcgtattgatgagacatatatcaaaattaaaggacagtggtgttatctgtatcgcgcgattgatgcagatggacatacattagatatttggttacgcaaaaaacgagatcatcaatcagcatatgcgtttattaagcgccttattaaacaattcggtaaacctcaaatgataattacagatcaagcaccttcaacgaaggtagccatggctaaaataattaaagtgtttaagctgaaacctaactgtcattgcacatctaaatatctcaataacctcattgaacaagatcatcgtcacattaaggtgagaaagacaagatatcaaagtgtcaatacggcaaaaaatacactcaaaggcattgaatgtatttacggattatataaaaagaaccgtaggtctcttcagatctacggattttcaccatgccacgaaattagttatatgttagctggttaggcgaagactgacacaataaaatggtgattagctatatttttctaactttgcaacagaacccttaatttcatagaacggcgaaattaatacatgttagtcagctaattgaatacttacattataagagagtagttaactttatttttaatttgcaccagaactttttaatgtattatttcatccttgaataaatcaccccattcgcatattgcataaaccaccttatctagcttgtagcctatagatgtcagcttatactccacttttgggggaactacagaataaatatgtctttcaataatttggtcctcttctaattctctaagttgtcttattagcatcctttgattgacatgcggcaactttttttgtagctcacttaatctcaatactttgtcttgaagtaaatgaaaaattatagggatcttccactttcctccgataacacataaagctaaatctttagaagtgaaaaattcttttcctttataatacaattttcatccttctttcttctataatattagaatttacattgttaatgcggaagattatataatcttccgcattaactgcttatttatatctattctaaattggcatgattattttgcatagttgtttcatcaacatctaattgtgtcattagtccaatgactacactatctaaaaagatttgtgatgattgttcaaacaaactacctaacggttgatcagacccagtagcatcgtgttttgtacctgctggtaattcaactactgtgtctgcaatttcaccaattgcagaatctagtttagttgttagtaataccacttctgcttcaactgatttcgctttatctgctaataagcgaaggtgttctgttgaacccgaaccagaaatcacaataaataaatcacctttttgaattgatggtgttgttgattcgccaataacaaatgcttgcttgcctaattgattgagtctcattgcaaaactatttgcaacgaatccagaacgacccttacctgcaacaaatatgcgtgatgcttcagttacttctgatgcaaatccatcaaactcttcatctttaacatgagataaagtaccctttaactcatctaaaattaattgataatgattaaaagttgccatcattatttaccttcaatagcgtcacgacattgtttagctgcttctacagggtcatcagcatttgcgataccgccaccaacaattactaagtcaggttcttctgcaacaatttctttaattgtatctggtttaataccaccagcaactgcgactttagaatttttaattactgatttaactttacgtaagctatctaatggagattgtccttcagcttgtaaatcataaccagtgtgcactgcaatatagtcagcacccatttcatctaattctttcgcacgtttttctaaatcttgtacagcaatcatatctactaataattgtttgtcatttttatgtgcttcttcaactgctgctttaattgacgcatcttctgctacacctaaaattgttacaacatcagcgccgaatttaacagcttggcttacttcatagtctgctgcatccatgatttttaagtctgctaatactttagcattgcttatattttcatttaaatgttgaacggcaggtaaaccttcattaatcacaattggtgtaccaatttcaacaatatcgacatattcttctacttttttcgctaattctgctgcttcttctttatttaataaatcaatagctaattgtaattccactataattcatcctttcattaatttatacctttattttgacataattatcaataaatcaatactgacaaaattggcatatagggaatgtcagcttatctaaagggggtgactattttttcagtatgaataatattacactgtagtgtacagttggaattgtaaatataagactaataattacaaatttggaggctttttagatgactcatattcaattagattatggtaagactttagaattttttggagaacatgaattagaacaacaaaaagatatcgtgaagacattacacaaaacgatacatgaaggaactggtgcaggaaataatttcttgggttgggtagaccttccaattgattacgataaagaagagttttcaagaattgtagaagcttctaaacgtattaaagtaaattctgacgtgttagttgttattggtattggtggctcataccttggtgcacgtgctgctattgaaatgctaacatcttcatttagaacaaataatgactatcctgaaattgtttttgtaggtaatcatttatcatcaaattatacaaaagaattagtagattatttagctgacaaagatttctctgtaaacgtcatttctaaatctggtacaactacagaaccagcagttgcattccgtttattcaaacaattagttgagaataaatatggcaaagaagaagctaaaaaacgtatctttgctacaacagataaacaaaaaggtgcattaaaacaattagctacaaatgaaggttatgaaacatttgtagtccctgatgatgtaggtggccgttattcagtgttaactgctgtaggtttattaccaatcgcagctgcaggtattaatattgaagcgatgatgattggtgcagcaaaagcacgtaaagaattatcttctgacaaattagaagaaaatattgcttatcaatatgcaacaatccgtaaccttctatatagcaaaggttatacaactgaaatgcttatcaactatgaaccgtcaatgcaatatttcaacgaatggtggaaacaattatttggtgaatcagaaggtaaagactttaaaggtatttatccttcaagtgctaactacactactgatttacattcattaggacaatacgttcaagaaggtcgtcgtttcttatttgaaacagttgtaaaagtgaatcatccaaaacatgatcttactattgaagaagatagtgacgatttagatggattaaattatcttgctggtaaaacaattgatgaagttaatacaaaagcatttgaaggtacattattagcacatacagatggtggcgtacctaatatcgttgttaatattccacaattagatgaagaaacatttggctatgtcgtgtacttcttcgaacttgcatgtgctatgagtggttatcaattaggcgtaaatccattcaatcaacctggtgtagaagcgtataaacaaaatatgtttgctttacttggtaaaccaggatttgaagatatgaaaaaagatcttgaagcaagattgtaggttataaactataaagaaatgagaggatacaatgtctagtaatattggaattttaggtttaggtgttatggggaaaaatcttgcgtggaacatcgaggataagaaatattctgtgagtattcatagtagagataataatgaaattaatgatactattcaaaagtctcattatcaaaagatatatcctgcgtataacttgaaagaatttgtagattcattagaaaaaccccgtaaaattttgttgatgattaaggctggtagtcctacggataacatgataaatgccttacttccattattagacgatgaagatattttaattgatggtggtaatacaaactatcaagatacaattcgtcgaaataaaacattagctgaaagtggcgttaatttcattggtatgggcgtatcaggtggtgaagtaggcgctttaactggtccttcattaatgcctggtggtcaagaagccgcttataataaagtcagtgatatcttagatgccattgcagctaaagcgcaagatggtgcatcttgcgtaacatacattggcccaaatggtgcaggtcattatgtgaaaatggttcataacggtattgaatatgcagatatgcaattaatcgctgaaagttatacaatgatgaaagacttattaggtatgagtcatactgaaatttctcaaacattcaaagattggaatgctggagaactcgaaagttacttaatagaaattactggtgatattttcactaaattagatgaaaataatgaaccattagtagaaaaaatattagatactgctggtcaaaaaggtacaggtaaatggacttctattaatgcattagaattaggaattccattaacaattatcactgaatcggtatttgctcgtttcatttcatccattaaagaagaacgtgttaatgcgtctaaatcattaaatggaccacaagcttcatttgatggtaataaagaagaattcttagaaaaaatcagaaaagcattatatatgagtaagatttgttcttacgctcaaggctttgcgcaaatgagaaaatcgagcgaagatcacgaatggaacttaaaattaggtgaactggcaatgatttggcgtgaaggttgtatcattcgtgcacaattcttacaaaaaattaaagatgcttacgataataatccagaacttgaaaacttattattagatccatacttcaaaaatattgttacagattaccaagatgcattaagagacgtcgtagcaacaggcgttaaaaacggtgtaccgacaccaggattctctgcaagtgtgaactactatgatagttatcgttctgaagatttgtcagctaatcttatccaagcacaacgtgactattttggtgcacatacttatgaacgtaaagaccgtgaaggtgtgttccacacacaatgggatgaagagtaatataattactgttacggaatgaaaaccagaaactagctaatcaagtaaaaggggggaactgctttggataaaaatttatcatcattaataacaatatttggcggaacaggagatttaagttacaggaaattgctaccttctatttttaatctttataaaaagggtcactttaagaaattagttatcatttctacgggtttagaggatataagtgatgaagaatatagaagtaaagtaaaacaaattttattaagccaagaaaattttgaaatggtgaacttatttttagataacatattttactttcaacaaaatgttgaagataaaacaagttggaataaattaaaggaactttccaatgatattgataaaaaatattgtttggatggcaatagattattttacttagcaatgaatcctcaattttttaaaattataactcaaagcataagccaatcaggtctttctgatacaaatggattttcaagattaataatagaaaaaccatttggaaaagatttgaaatctgccgaagacttaaataaacacataagacagtattttaaagaagaagaaatatttagaatagatcattatctaggtaaagagatggtgcaaaatattgaatctttacgttttggtaatacaatatttgaaccattgtggaacaacaagtatatatcaaatgttcaaataactctatcggaaactttaggcattgaagatagaggccaatactatgattctacaggagcgcttaaagatatggtgcaaaatcatgcactacaaatacttactcttattgctatggagaaacccgaaagcagaaatagtaaagatattagactaaaaaaaatcgaacttttaaacaatataaaatttttgaaaggggctgatgtacacaaatattttgttagaggacaatatattaatggtattattaatgaaactccgataatgtcatatcatgaagaaaaaggtgttaatagtgattcaacaacagaaacatttgtagcagggaaattactcattaataatgatagatggaaagggacaccgttttatattcgtacaggaaagcgtttaaataaaaaagcaatagaagttgttatagaatttaaaaaattaaatagtaaattaatctatgaaaatgataatgaagatgttgattgtaatttaatggtaataaatatagaacctaatgcccaaatatcactatatatttatgaaaataaatcaactagaaataatagaaaccataatatacaaatctataacttaatagataaaaaacaagtagtggatgcttatgaatcacttatatgtgatgctttaataggaaatcaaactaattttgtacattgggaagaacttaaacattcatgggaatttatagattatataagtactgaatggaaaaaatctaacgtaacaataccacagtataaaccaggaagttttggacctaaagaaagtgatcaattacttaaacaagataactttgaatggtggaataatctataaaacgtaaatattgcaaaacactatataggagaagttaaatgaatattctaatagtatatgcgcaccctgaacctcaatcttttaatagtaaacttaaagatattgcacaaacagtattgaaggagaatggtaataatgtcgttgtatctgatttgtataaaatgaattttaaccctgttgctcaaaaatctgattttaaatatttaaaaaataataacttttttaaatatcctatagaacaagagcatgcttacaaaaataacatattaagtaaggaaattaaatctgaattaagcaaactattgtgggcggatattattatttttcaattccctttatggtggtcgagtgttcctgcaatattaaaaggatggtttgataaagttttaatatatggagggatttatggaggggcatatgggaagtttaagaacgccagattatctaataaaaaagctattataagtacaacaactggttcatcagaagatagttttaaaatacatggttcatcaggagatatacacaaacaagtactatttcacattagtcatggaatagttgaatatactggaatgcaatgtttagatacattaatcgcatatgaaattgataaagatcaaaatagtagagatgagtatatagaattttttaaaaacaaaataaagtatatttaacaaaattgaaatacggagtagagaaataaaaaagctaagtcattgatttattaaagcataaaacacttgtatgggctattatagggaagtattctcagaatgtgttaaaaatattattaaagtacttaatccagtgcctatgtatattaatttagaaaatgtaacatacattcagttaagagaaatgtaataatgtagaaagcatggttctgttgcaaagttaaaatagtatacagttctatacaaagtcagaggctttaacgttgttttaataataagttatgccactcaatttgattaaagtttcattttttgtattttttgaaacgagtttcttcttgtcttgatatatttttaatttttcataagcgaacgaatttatttccttagtgttaataatagtaaaaatgagtatataaaaagaacataggtcttttaaaatctatggattttcgccgtgccacgaaattaatcacatgttggctagttaagagaaaataaatatattcaaagataattagctattctttctggactttgcaacagaaccatattgtttatattattgttttcctaattctcgtagtatttgtctttaaaaagaaaaatttctaatctaaatcctcacactctatagttttgcatttctccactaaccaatgttataatttagttaacaagagcttcgtgcattatatgcaccaatcccctcactactcgcaatagtgaggggatttttaggcgttggctaatatcgcctattttttcttattgttacatgtacgtagccaatgcgtaaataacgcaacaatacaaccactgatgactgtggtcgtgatgtgaacaagagcttcgaccatttgatatgcacctcctctctgcgtctgaattgacgcctgagagataggcgacctatatattatatcatctccgaatatacgatgataggtagcttccgataagttgaaatatgttaaatagaaattaagatacttaataccagtacctattacagtatactatcgttaatttggtgtttacagaaataccatgttactatcaccatcttcaacacctatatatttcataatatttattcaatacattctaaaatatgaatataatttttgatagctttttcagctatattttgcattgatttgccacttgagacagactcaattttaagtaatttatgtaattctttgttcactttaatcattttatattctgttttaatttctttttccattttgaataaactccttaaagtcaattatattaatcaattgcattgttaataataccttatttaactgttaaattctttaatagcatccctaatctcttcttttaatttttcatcatttttatagcctttcaaatttatatattccgcatcgttttgcacatactttaagaagtctttaaatgtattcacatagcctgcataatgataatattgctcttctagattatcgaaatcttctcttgtcacttcatattgaccataacctgccataagttgctttttaagatcttgattctctttttcaagtgcatcaatgcgttcatcggcaggatatacaaccgtcggtttaatccgattacctaatgcagtaagtcgtgtatatgccgttggatttaaatctctgatttcagcaagttgctttactttttcgtactcggcttcagttaaattgatattgattgttttagcttttttatgattttgatttggcattgatatcccctccataactaagtaaatactcaaaaaataaacactatttttattgagtgattgcttagttactattttaacatatgaggggatatttaatgagtaattactaatattaaacttcatttaaataattagtaattactcactgtttaacgcgcacatttttgcgcgttccactaagcaaatactcatgagtatttgctattttttcgcagaaaaaatcccaaggggcttgggggatttatccaccaacaagcagggtatctaggcacgaagtggctagcattcccattgcttgccaaaccactatattacttgatgaaatttagattatcatataatctaaatttatattaagtaatatctttcgtagaaagcgtggtgggaggtatgagcgaacaaaaacactttgtggctagcgacgtaactgttgggcaaaaccataaacccaaccgtaaggagccgaaacaaattagttttcgtgtgagcgaatccgaatatttaaagttaaagcagtcggctgaaactttaaatatgagtgtgcctgctttcgttaagaaaaaggcacaaggcagtcgattggtcgtaccaaaatttgataaagaaacgcgacaatcgattgccaaggatttaagcatgttgggggcaaacgcgaatcaaatcgctaaatattgcaaccaacatcaacatgaagcaccgaattatgaagcattagaatataatatccatgaattgcgagaaaggttggatgacatatggcaaaggctaaaataagaataatttcttttttactcttattcatatttgtaattacttatgctgttctttctttcacaacagattatattaatcacaagtattctcttttatttgtattagttttcgcattatggggcattttaactgatattttaactaaaccgaataaacgagatgataatagtggcaacaactaaattaagtgcgacgaaatcaacgtcacgtgccatcaattacgctgaaaaacgggctgaagaaaaaagtggcttaaactgcgacatagactatgccaaaagtagttttaaagccacacgtgaactctatggtaaaacagggggcaatgaaggccatgtcattattcaatcatttaaaccaggcgaagtaaccccagaaaaatgtaatcaactaggcttagcattagctgaaaaattcgcaaccaatcatcaagtggctgtttatacgcattgtgatactgatcacatacataatcatattgtgattaatgccgttaatcttgaaacaggtaaaaagttcaataacaacaagcaagccttacatgatttaagaaactttaatgacgacgtatgtcgtgaacatggcttaagcgtgccagaaaaagatacagcacgcttacgttatacacaaacagaaaaagcgattgctgaccctaatacaaaatcaaccgctcaatattcatggaaagatgacatacgtgaagcaatcgaccaatcaacagctacaaatatggacgaatttaaagaccatttaagtcaatatggcattgaaattgcacgagttacacctaagagcattacctatcgacatctagctgaagataaaaaagtccgtggccgtcgattaggtgaagattataacaaagggggcatagaagatggctttgaaagacaaatacaacgacaacagcaagaacgagaagatgacaacgacatccagccaaaacgaccaacttcaaaccgtgatgaaccagctcaacgagatacaggcgtcactcaatcagattgggataaatttgcccaagacacaaatgagcttgagcgtcgccgacaagctgcagagtcagcaagacttgctgatgaaaaggctcgaagagatcgagaagagagagaacgatcgaaacaagcgtcacgaacaattattgacaacgatagagaccatggccttgaactttaatcaagccacagaaaaaacacaaaaaagatttattagcgttgccaaacactatgtggaacgtattaataacgataatttaaaacaagattttcaatcagcaatccaacaagaattagaagatgtgaaatcacaaacacaaaatctagttaaacagtttcaaaatcatcaatcagacctacaaaaagcacatgatgactataaaaaaacacttgatgagcgcatcgaaacgaacgaaatggcgataaaacaatatgatcaagcattcaatcgtttaactaaagggattacagccatgtttttcatcgtcgccttagtaatgattacttttgtagtcttaagtccattaggcgatttattaggcgtacaacatttttataattggattaaccacgtcttaaaaacaggtcattcagcatggcgatatctaattgtgacgctttatcttgtcccttacatcttatttagtttacttatatatggtattttaaaggcgtatgagcgtctttaaacttaatctgtataaaaacctataatttatcatgaaaaacgctgtataagctttaaattagtttagaaatggcattaaacattgtttttttatattaggagatcccaaatgcttatattcttgtttattttaatgagtggatttttaagttattacttgattaatcgttcaaacaaaaagaaataacgctattatgccgagaaaatttattgtgcattgagaagaacccttaattaaactgtttcgacgaatgtcggtatagcgtgagctataaaaccgacgagtcgacagttttagggtttattaagggttcagaggctcaatgtcaataaagcaattggaataatgcaataagtaaaagttattgattattaaaaaaccaatcataaaatatgattggtttcctttttgtttttttgaattttaagtggcaaattgccccgaactttttaatatctttttataaatctttttaaaacctttttaggcactttttgagccttagagccacaatggatttggaatgctaaaggcaaccaatcattaaagtaaaggcaaccaatcattaaagtaaaggcaaccaatcattaaagtaaaggcaaccaatcattaaattaaaggcaaccaatttaaaaaaagtttctttggtgttataatgactatattaaaaatgattataagtgtttttataaaaattatataggaccctttataaaataagggtcctattagttcggggtggatttaattgagtggtgaaacagtagtatataaaaatgatatgaacttagttcctttgagaaaatttaataatacagaagttaatttgttttttactttgtgcaataaattaaaggataaaggcaatttaactgtgaatataccatttgaagaattaaaagaattaagtaattattacagtcatgataaaagattatttattcaagatttagaaaaattctacgataaaattttttctttaacatatagagaagaaactgagaatgtcatcagaagatttgttctttttactaaagttgaaatttataaagacgaagaatatgtttctattggtgttaatccggatttagaacatattattaattcattaactagtaattttactaaatttgagctacaagagatgacacatcttaaatctacatattctaagcatatgttcagaatacttaaacagtataaacacactggatatgtgaaaattaaaattgatgattttagggaacgtttagatatcccaaaatcttacaggatgacaaacattaatcaaaaggtattatctcctataattaaagaattaagctttatttttaataatcttcatatcaataaaattaaagcgaaaaaaggacgtaaaatcgagtggttagagtttacctttgacgctgagaaacgcattcatagtaagcgacaaccccaaatggcgaatgtagcccaacccaaaaaatatatcagtcgagagaaaacgccaaaatggctacatgaacgaaatcaaagtgatacaaatagagaaatgactgaagaagaaaaagcactattaaaagaacaacaacaagcatttagacaacaattagaactagattgggaagattagaaagtttacaaataaaaatataatggatatactgaagttaacaagtgaagtattattcgccatatgcgaaaaccccactgccgtccaaagcaaagtggggttttttatttatctatcgagtttatctgaaatgtaattcgcaactacaccagcaatcactgataagataaatgttccaacaagtgaaagtatcattaacaccatatgcacacctcctctgtgcacggaagtgctacacaattataaattaaagttttaactcatccaacctaaaacttcttttatcaaattgaaaattgaaactaaagctgcaccaatatcaataatttgaaaaacaattactgatacagatttattttcttcagaatttcgagcaatatatataccattaactacaaaaaatgtaatggctaatgctaaaaataaaacaaaaataattctaactataataaaatcaatattcactaaaaataaagataaaaataaaaatcccaaacctaaagttaacaaagagtattttgtatatttctcactatctaattgaacagctaaaaatataaaaccaagaaagaaaataataagccctataaaaaataaccaacttgtaaataaaaaagaaaataaaatacctataactaacaaaacaacacatattccatatccaactaaatcttgatcaatttgtacatctgaattatttttatccatctatagaaccttctcctcttattttctaaaattataccatgacaattatttttaatatgatactatgtaacatctaaatacgatatatcaattacaggtaaacaagtttattagttaactagtatacgcatgaataatgatttgtgtaatttacacttgtgtaaactgaataaagatacaaaatatagaacaatgaaaatgactgaaaacgcatcagatcaatgatgtataaaacctgcataaacgataatcataagtaaaaggcttaaacgttgatttaacagcgtttaagccttttaagttagttgacataattagttcttataggtagttagtttgtataacatatccatttttataaagaggtttatctatatattgttatactaaaatatgattagtattggttaataaccatatctgtatagtcttcttcttttattattcgaatttgattattactcgattcatgctctactccccatactttcgaccgtttaaaaatcaacaaatcacaaaaaaccaataatattagaatacatattcctttgcaaaacttcataacatctccccttaaataccattctttctatggtatattttaataatttttaactggctttttagccaataatgcacaaactaaaccaataatggggaaaataatcatcatataaatagttaatgaataggattggaaaatatcatgacctaggcctaatggtaatgctcctaaagaggaaccaatcactagcatagttgattcaattccatttatactccctacatgcttacgtccaaagtagttagcccaaacaatattggttccaattctttctagaccgttcgcaattccccatatgattccaaatagaatagctaaagaatatattgaggaaacttctgtacggctccatccaaatgtttgaatatattcatcaataaatgctgcgtttgaataagtttggccaggaccagagaagaaaactgtcaaaccagcaataaatacaataacccaaccataatagaaatttttggttttcatctaatattcacctctaaaataaaactcaatcctttcacggattgagttagacagactattttacaataacaacgggaatttctgaacgttttgctactttgtgactgacgctacctaacaccatttcttgcaaactatttaatccacgtgttcctaaaacaatagcttgaaattctccactattggcaactgaaacaactgtgtccgcaggaacaccatgtgcaattttcatttcatattttacattatgctctacaaataactcagtgatatgagagagtttgtcttctctttcattcgtcaaactggaactttgtttaccatgtaaaacatctgttttcgattcctcaacatctacaactgtaagaatagtaacaatcgtattatcatctataaaatttaaaacctcttttgctgaacgcaaactattctctgatccatctgctgctaataaaattgatttatacataaataacgctcctttagtttaaatgattttcatttagttggcttaactctgaaacaactttacgactatctgaatttaatttttctacacgaacaatattatttttttcttcgaattttcgtactatcgtgtcaattgcatctactgcagaatcatcccataagtgtgcattattgaagtttaattctatggtactattttcaatctcaaagtttatttgctccatcatagaatcaatagaaacaaaaaagatttgtcctttaaaagataatcggtttattttaccgaactcttcagaaataacttctacttttgaaattttagtagcaaagaataaagcactgaaaacaacgcctgcaacaacacctaaagctaaattatgcgtcattaaaacaataatcactgtaataagcataacgactgcatccgtttttggtgctttcttaatatatttaaaggaattccaatcaaatgtaccaacagaaaccataaccataatacctgctaaaattggcattggaacttgaactacaagtcctccaagtacaataatcataaatataagtacaatacccgctgtaaatgtagacaatctactgtttgcacctgatttaacattgatgacggattgaccaatcatggcacaacctcccatgccaccgaataatccggtaatcatgttagcgataccttgaccacaggactctctatttttactactataagtgtctgtagcatcgtctacaattttagctgtaagtaagctctcaactaaacctacaatagccatagataaagagtaagggaaaataatttgaagagtttctaaattaaagggaacattagggattaaaaagtgagggaaagcttgtttgatattacctaaatctcccacagttctaacgtcagaacctgtatacatataaagggcagtcaatacgataatagctattaatggtgcaggtatagctttaaaaaatcttggaattatatatacgatgagtaacgttacaattacatatatataagttgaaattgatatcccaaagatatgttctatttgagacataaaaatcatgattcctagagcattcacaaaacctatcatgacagaacgaggtataaatttcattagacgacctactttaagaagtcctaaaattaattgaattaaccccatcagtatagtagcagctagaagatactctacaccgtaatctttcacaagtggcacaattaataaggcaatagcccctgttgcacctgatatcatcgccgctctaccacctacaatagcagtgacgacagcaataatgaacgaagtatataaaccaaccataggatctacaccagcaatgatggagaatgcgatagcttcagggattaaagctaaggcaactacaatacctgcaagtatatttttgcctggctggttaagccattcattttttaatttttcaaccataacttactctcctttttatttaattatattgtaaagtatatcagaaaagtttcatatgtataccccttaatgaaactttgtgttaaactttagctacagggtggtgcaattaaatgaaatacggttatattagacccgttacaataaacgacgatttaaatgaacaaaaaaagaaaatagaaactcatacaaatgaaattgttgaagaaattcatgctaataataagaagaggaatatattagatgttcttttaaatgaaaaattagttcctggagatatgttatacgttacggatttatgtattcttgcagattctacgaaacatttagtagatatattagattatctttctcaggaggatatatctttatatgttattaatttaaatcgttatatttataaagacatcaaaggtgaatttatagagatattacatgatatcacagactttcaaagtgatattgttaaatttagaactcgtgtaggattagagaattattcaaaagatggaaaaactttaggaagaccaaagcgagatgataaaaatcttagagatgctattgaaatgtatatgagcaaaaaatacactttagatgagataaaagaacagacaaacataagtagggcaactttgtatcgtcatctagataaataagaggtgatgaacgttgttacaagatatagtctataaagtattgttatcgattcgagaagaaaatagcgtagattttaaaacgttggatgtgagtgaaaaaaccttttctattagcacttgagagcgtagcaggggaagatttagcacaaaaaatttctaaatttcaaataactatacataaaaggctttttgttttatatatccaagggcgcacttacatacctaaaaaggtatagtgctaaaaacaaaatttgcgtgtgataatcaaatatctttatttgcattttaaaggggtatttagagcaaactctaaatttatatagttttatatctgtataatcgtctttatttcttaaaacgcaaatatgagccaaataagaggtgttctttatgacaataaactttgaatttacattttccgtatttgataaaacatcacaagaaatttctgatctatgtgatattccaaacgaccaaagaattataaaaacaattcaaattatgaaaaaggaaaatatctctgatactgattttgaatttcttaaactttatgatttttattttgcagataaaccatacataaatttctagtaaatccagtgttgatttttaagacactgcccatctacatgcaaattaaaattttcatagtaaaactgggcaaccatgccggttgaacgctatagttcccgcaggggcaaaaatacataaaaaaacgctagcttttaagctaacgtttcaaatcttttaagtaataattttgtttttcaaaattccaaattgcagtaattgaatgtgctttttcttcttcgtctgttgttttatcttcgtcacttgtattaattaaattaccatcttcagcatcgtctaaatttaaaattttatgtttttgtttaagcaatcccccataactcaacatacgttttcgatataaaccttgttctaaatcactaacaatctccgaatattttgagatctctttgattactataggttgtttgaattactgattaaagatattgtgttgtttcatgttttgacgtcgcatataaagtgcatgtgtttcttcgaattcagctttaatggattgcattaaatacccttgcatagcttcaacggtttcattcttttgtagcagcatcgctttaaaacgtttcaacacacttacaatttcaaactcaacatcttctaaacggtaataggtatcatgtgcattattaaatgatttcttacctttgagtaacacacttttaataattcgaatttctctaatttcaaatttacttaaatagtcttgaagttgttgaggtaattcttcgagtacttggaacttaagcgcatcattattaaattcggtttgttgatgatttgtatgatccgaatgattattgtttattggattgttgtatgtatcattcatatcatgcgtatcattattctcagtctctatataatcagtattacttaaatcagtatcattagtgtattcttttgatatgtcatgatgtatcaaattaatatttcttgatgtatcattatcatatttctggacgtatgaatttgatacgtccgtgttattgcgatgttctatatcgttttcttgttgtgaaatataatatacatcagcttctgttacttccggttttttaatatataatttattaggtttatttaaacctactcttatttgattgaataaatcagcttgagttaattctttttttattttagataacttatttggactactaatatttaaaatagatttaagcttttcgttggtataaataaaaaatatatctccatttttatctacccaattatttcttatggataaatctaaacgatctcttagtattgaccaagttatttttgcatcattagacaatttagtatatttaggattcgtaaaaaacactttaggtaattgataaaatttctctttttggatttctttaatattaaagttggacatacaaaaacctctttcatatttaaatttctaaaagaggtaataaaaaagctataagtaagtttatatgtattcgacttgcactaataattcttagtatatataataagaatataacaactatataaacaaacaaatcacttgttttattaccgaagaaacctgactattcccgtagttgggtttcttttatatatatttatcttaacacttttaaaagttttgttaaattgtttatatacatttgagtgtatgcattttcaaagaaggataaaacttcgtataatgtctttatatggttatgtcgtataacaccgtataaacgcttatacagcaagcataaagagcgtataatacctatataactagtttaaaagattatacatataaccttatatacttatacgcataaccgtatagagttatacgtataatgaattatatgtccttgtaacaacaagtataatggctatataatggtataaatgttatgtatataactatatggaggtcgttatatgaagagtatgaaggaaattgccgatgaattaaacgtaacaaaaatgactgtttataataatgctaaaaaagcaaatgtagaatttcaaaaaatcgataacgtaaattacttatccagtgaagatgaaattatagtagtaaaccgaataagaaaaaatcaaaataagaatgatgattttgaaagtgaaaaaaaagaagaagctaaacctaataatgataacctggtaaaagatgagacaataaaacaattatataaccaggtagatatatataaagaacaatcaaatagagataaagagcaaataaatacgcttaatagacttttagagaatcaacaagttctggcattagagagtaataaaaagattcaaaagttagagaatcaattagaggaagaaagacagcttaattattcttttgatacatctattaatgataggaaaaacgttaatgtgcaagaatcaacattcaccgaagaatctaaaggcattaatcaacaacaaaatgatgaacagccaacagaagtacaacatgatgatatagctgaagagaaaaaggatgacaatacaaacgaagaagtattagcaaaagatgatgaaccatctgaagaaatagagagtgaaactgaggataggggagaacagccccctaaaaaagggttttggagtcgtttgtttggtaactaattgtaattaaaaagggcacgacaagttcataaaggcactgaacccttaaaatgggaatttaataaaaacactgttttctaagctgctgatttcctgaattctataggagctaagtagcctagtttttgttgaattctaactttattatagttttcaatgtaattttcgacaatatctattacaatgttattagagctcttgagctctttgtttaagtagaatgtttcagactttagtgaggaatgaaaacattcaatcggggcattatcggctagcgttcccttacgggacatgcttctggtaatgcctttttctttgcacaattcataatattcatacgacgtataaacactaccttgatcactatgaagaatacaaccatccggaatttccacttgattaagcgtatcgtttactaaactttgattttggtgactatctatagaataagctataatttctccgttatagacatccataattgatgaaagatacaacattgtattaccgaaaggtaaataagtaatatcagttacaagtacttctaatggacagcttgcgttgaaatttctctgtagtaaattatctgttttataaaatggattacctggttttttagatttcttaggtttaacgcgacaattcaatccattttcctgcataattctttgtacttttttgtggttaactattatttcgctaaacttatttaattcagcagttactttcctatagccataggtatagttgtgtttatgacaaatatatttaactttttcttcaattgaatctaattcataatttttatatttccaacgataataagtggatttgggaatcttaaaaacctctaatattaccttaactggataccttgatttcaacgcattaaccacttgtattattacttttggcgccacttcctttccaattccttgtacttttttaaaacatcaatttcagcttgttgacgtctaatttctaattttaatttatcttcattactgaattcttcaattccctttccatatgaatattgttttccgacttgttgaggaaacctgttgctttcaccatctctataccatttccaccatctttgtacttgagtcttatttttaatatttaaagtgtccataatatgtttagtagaataaccttgaattttcatttctattactttgtttttagtttctactgaatatgctacttttttcatagaaaaaacacctccgaataaattcattttaatatgaattcaacgaaagtgtctttattttactcccattaattggggtcagttcattcaataaggggtctcttttaatatgccttctgataatcataagatgcgtaaagtaaatatactttttagcattatacaaactatattataattttataaaatttactttaacgttaacgaataaaaaagataacaatagaggtggtatatgatcattttcattgggatgtaacagctttgttgcttttaatcaaacaattaagggctatttatagtttatcagttgataatttaattagtggaactgtatttgagagtagagggaaaaaggtgcaaagatgaaaaataaattatttagcattatttggatttttatttttatcaattatataggattagcggtgttacttattttgtatgttatatcagctgtatttatattaagtccattggtatttgttcaattaggggcttgataatttcagttgattggaattttctttaggtattggttttgctgtaatttatactgttagcgttatctaaaaaataacagcatatctaattaaacaagaacttcttaaggaaattaataattaaaataaatttgtagataaataaaggttagtttcaagatatttaggaaagttttaaaaaagccttgacaaaaatcgattacaaatgtaaactataattaagtatttcgattacaaatgtaaatgaaaagagggagaaacattgcaaactgaaatagacgctaaaatcacggattccgaatgggaagttatgcgcgttgtttgggcacaagatacagtgaccagtaaagaaattagagaaatattgcaacaaaaaatggattggaaacctgcgactacgaaaacttttattgggagacttgtaaaaaaaggaatgcttcatacagaaaaagaaggaaataagtttatttattccgcaaatattaatgaaaatgaatttatcaaaaacaacttagatgaaaccttcgataatatctgtaataaagacgttggtagtacaatagtggatttaatttcaaaagcaacgttgagttttcaagatatagaaaacttggaaaaagcacttgaaatgaagaaaaaatatgcggttcaagaaattccttgctcttgtgttcctggacagtgtaaatgtagagattatagctgttcatcaggatactaaaatatcaaaggaaattaaaatataaaaggagtgagagttatgagaaaaatcaccctacaaattacaggtatgagttgtgcccattgtgtaaataaaattgaaacagcattgcaagactcacgaggggtagttagtgcaaaagtcaatttgaaaaaaggtatagctagagttaaatatgatgaatcagctcaaacattagataatttaacagcagctgtaaaggatgttggatatgaagcaaaaccagttaactaaaaaaggggttgaaaataaatggctaaggaaacattaagtatagaaggtatgacatgtgcatcatgtgtacagacagttgaaaaagcaacaaagaaaatgcctggtgtacaagaatctaatgtaaatttggctacagaaaaattgaatataagttttgacgagaatacagtttccatacaagatattcaagaagctgttgataaggctgggtataaggccttgacagataatgagcaaagaacatttgctatcataggtatgacgtgtgcttcatgtgttcaatccatcgaaaaagcaacaagaaaattagaaggcgttatacattctaacgtaaatcttgctacagaaaaaatgacggtagagtataacccgacagccgtttcagtgtcagacattacccaagcagtatcaagtgcaggatatgaagcacaagaagatatggaaacgtcagatgaagccaatgaggaaagagataaaaaacaaaaaaaagtgaaattcatgtggatacggtttttgggctcagcagttatcaccatcccgttactttatatttcaatgggacatatgatgggcttaccactgccaaaaatacttaatccaatgatgaatcctgaatggttttcattattacaattgattttaacgttacccgttatgatttttggatggaagttttattcagtaggatataagacattatttagaggacatccaaatatggactcattagttgcgttaggaaccagcgctgcgttcgtatacagcttaggggcgacaatcgcaatttggaccggtcgttctagttatgtagaaaatctatattatgagtcggcagccgtaattcttaccctcattacgttaggtaaatatcttgaagttcgttccatgggcaaaacatcagaagcgattggaaaattaatgggattagctcctaagaaagctattgtcgtaagagatgggaaagaagtagaaatttctgttgatgaagtttcagtagatgatatcgtcattgttaaaccgggtgaaaaaataccagttgacggtgtgatattagaaggcgtcacgtctattgatgaatccatgctgacaggtgaaagtattcctgtagaaaaaagtgcgggtgccaatgtcataggagcaagcatcaataaaaatggcacaatccgatatcaggcaactaaagttggaaaagatacagcactatcacaaataattaagttagtggaagatgcacaaggatctaaagcaccaattgctaaaatagcggatattatttctggatattttgttccaattgttataggtattgctagtatttccggtttagcatggtattttggagggggacaaacgggaatcttcgctttaacgattactatttccgttttggttattgcttgcccatgtgcgcttggccttgcaactccaacagcgattatggttggtacgggcaaaggtgcagaaaatggcgtattaattaagggtggtagtgcattagaaacaacgcataaagtccaaacgattgtatttgataaaacaggtacgattacagaaggtaaacctaaagttacagatattttcaccgaaaatgggatctcaaaaatgaaactattacaattaacagcttctgccgaaaaaggttctgaacatccattaggtgaagcaattgtcaggggagccgaagaaaagggacttgacttcgtgaaagcagaaaactttaatgctattcctggacatgggattgaagtaactgtagatggtaaaacaatgctcgcaggaaatagaaaattaatggatgtacgcgacatttccttagatacattggcaaatatatcggatgagttagctggacaagggaaaactcctatgtacattgctattaacaatcaaatggcaggaattatagccgttgccgataccgtcaaggaaaatagcttaaaagcaatcgaaaaacttcataaaatggggatcgaagttgcaatgatcacaggggacaataaaggtacagccgaggcaattgccaagcaagtcggaattgaccgtgtactaagtgaagtattgccagaagataaagcaaacgaagtgaaaaagctccaagagaaaggaaagaaagtggcaatggttggagatggaatcaatgatgcaccagcgcttgctcaagcagatattgggatagctattggttcaggtactgatgttgccatggaatctgcagacattgtactaatgagaagtgatttgatggatgtcccaacagccgtggaattaagtaagtctactattcgaaatatcaaacaaaacctattttgggcatttgcttataatgtgctaggcataccgtttgccatgggagttttctaccttcttggtggaccgttattaaacccaatggttgctggggccgcaatgagcttaagttctgtatctgtactagtaaatgctttacgtttaaaagggtttaagccatcagctgtgtagcaaaaagattaagtttagaggaagattcaaagaaaatatttggcactcaaatagtcccgatgtttactttttataaaaaaagattattagataaaagaaagctaagcaaacattatattgatttgaaaataataaggatgaaatagttagtatattaaaaaatgaaagaagaaaaccagtatttctttttaacttagttgataattagttattctacttcttaaagggaaatgaatgtaatttaatgaggtgatataaaaagtaattagacagcatttttttaaaagtaataataccttaccctggtaatgtatttaacatcattaatttaaggagtaatttatatgaaacaagcaacacttaatgtgcaaggaatgtcatgtggatcttgcgtgaataaagtagaaggaaatgtaggtaaattaaatggggttgaatcagtcaatgttcaactttctgaaggtaaagtaggcgtaacatttaatgaagagtcagttgatttgagagatatcaaggatgcaattaaagatacagggtatgaggtaatagaggaacccaccgaggaagatgaacccggatgctcatgctgcaattaattagggaaaagggcgttctgatttttggcgcgccctttttataccataaaactttagaaggatcatcgtagaaaaatttatggtaataggtattaacccgatacagttgttaagaggcatatgaatgcaaattttgttaagaattaaacaagaggaccccgatattgtgaagggatttttaagaactgtttctaaaataataaaatgttttttctttaccatttactctactgatgtaatgtgaatatgaaaaataagagaatcactttaggtggtgaatgtttttgataaggttagaaccttttagtaaacaagattttgatttacttataagttgggttgactcacctgaatttttaatgcaatggggaggaactgattttagttatcctttagacgagaagcaattaaatcagtatataaaaggtgcaaatgaagaatgttcgagggtgtatatttacaaagtcattttagataaaaccaatgaaccccttggacacatttctctgaacaatattgattttgaaaatcgttctgcaaaaataggcaaagttttaataggtgattcccgtatacgtggtaaaggaatagggcagaaaatggtagttgaattactcaaaattgcctttgataatctatccttgcatagggttgagttaggcgtatttgcttttaacgaatcggctataaaaagttatgaaaaagtgggttttgtaaaagaaggattactcagagattttagaaaagtgaaagatgactattggaacttatggcagatgagcattctagagaatgaatggaaaaaaactatttagggttttgagtaagtctccaatctataacttaataattacagaagacaactctttttaaaataggaaattagagcataattaaaaagtaattttataaattaaaggaggaaggaacaatgaatcatagtaaacataattatcatcatgtcgagtcagaggttaaaactaatgtgacttacgataataaaaaagtttcaataaaattggaagataatattggagcaccgcctgttcttgttttacaacatgaacaagaaatgcatttcatcattgtatctaatgatttagataggtactatcatttgcatccagagaagaaacaacaaggactctatgtagtaaaccaagatctaaacgatggcacctatcaagcgtttgttgatatagaatcggaaaataaggggtaccaagttacaccaaatactttacaggttggaacgagtgaaacaagtaaagcaaatcttgaaagaatggatgattggacaaaagagcgtgatgggaagatagtcactttagatgacgtggacgcgaggattgaagaagaagttccattggtctttgacacgtatggggaaaaaccaaatccatatttaggtgctttaggtcatgttgtgattgttgatgaatatgtagaacagtatattcatgtccatccagctacagacaatacaactacttttaatgcgcatttttcaaggcctggaatgtacaaaatttgggctgaatttaagtttggtgataacgtaaacgtctatccttttgtcatagaagtaaaagaataaaaaaagtaatataagcttaaggcgattaagtattgcactcttatctttttcaattgtagtattcaatttaattctacttacatgcccctgagagttatatataaacataaaattatcaataaaaataaagcatttcattgataaccgtttatttttttaagtttaatttttatatttataatatatttcaaatcctttgaaaggagagattttatatgattaaaggtataaagctcgaactttatacgagacctatatgttcagactgtcaagaatcaaaaaagtatttatcttcgaaccgtattgattatgaacataaagatgtaagccaaaatatagatttagaaaaggatatgaaaaaaatatctggtaaccgaattgttcctttatttgctttttataaaaaaaatttttggggtaaaaaaaagataattaaatatttcgttggatttgaaaataacaaagaagaaattttaaatatgcttaaaaaataaaatgaaaaagccattattctatgagaaaataatggctttttcttatttagtgatgatcatctttttcttcttttatatcacaaaataatctttcactatgatgattattagaggtctctgtctgtattgtgacatgttgaatatttttatggttaagctcatgttctatttttttaagtaaagattcattttcagcaacagacattttatcatctacaactatgtgacaagataatgcatttagtccactagttactgaccaaacatgaaaatcatgtacagtttttacttccttgaatgtttttatagttttgataatagtgtctgtatctacattgcttggggacccttccattaatacatggagccctgattttgttacataaaagccactacgtaatactaaagctgctacaattacactcgctaaaggatcggcccaaccccatccaaaaaacataataagtaatgctgctataaccgcacctatagaaccaagcatatcgctgataacatgtagatatgcgccgcgcatatttagattttcttctacatcgctaccacgtaacataatccatgctacaacaatattaactaataaacctactaaagcaataattaacattcctgtagaagctacttcaggtggattcttaaaccgttgcaatgcttcataaaaaatatacagggatattaatattaaagtaattccattaagtacggctgctaatatttcaaaccttttataaccgaacgttttactagtattagccctttttgctccaagcgtaaaagcaattaaagcgatacctaaagaaatagaatcactcaacatatgtcccgcatcagatagtagtgccagactgtttgtaataaacccgccgaatgcttctataatcatataacctgtaataataataaaactaattactaaagtttttttattggccccatttgtgtgattatgactatgatcatgccccatttaatttcctcctttttattagtgatatacatgttctacagtttgatttaatatcttcagaactaggcaatcatctgcagaacaataaattgttatacttacttccgaaaagatgtaataactttactatctcattgacggatacttctttttcacatagcaaatatagaatttcgactcttaattctatactcaatgctttaaaaatctgaacagtttgcattgaaactgtattattcaaaagaaaaattctaactaatatattaatatatgttcatatattaatatatttaatgtaatacgtcaataataaaatctatatggatgattatatacccctgggcggtatatgttatactcgcactatcttattgttatctttaaaaatttaaacttaggaggttttattgtgtcgaataacgaaaagcacccaaatcatagtcatcatgaacatgaagggcataatcatcaagaacatgagaatcacgctagtcatggtgatcatgcacatcaccatcatggaaattttaaaagtaaattttttatttctttaatttttgcgataccaattattgttttatcgcccatgatgggggttaaattaccgtttcaattttcatttacaggttcagattgggttgtattaattcttgctacaattttattcttttacggaggaaaaccatttttatcaggggctaaagatgaaatttcaactaaaaaacctggaatgatgacgcttgttgctctaggtatttcagttgcttatatttatagtttatacgccttttatatgaataatttcagtggttcatccacacatacaatggactttttctgggaattagcgactttaattttaatcatgttattaggtcattggattgaaatgaacgcagtaggtaatgcaggcaatgcactgaagaaaatggcagaacttttacctaatactgcagtgaaactgattgataataatcaacgagaagaagttaaaatatcagatatttatattgacgatattgtggaagtcagagcaggcgaaagtatacccacagacggaatcattgttcaaggagaaacatcaattgatgaatcattagttactggcgaatcaaaaaaagttcataaaactcataatgatgatgttattgggggttcaattaatggttcaggcacagtacaagttaaagtgacagctacgggtgaaaacggctacctatctcaagttatgggtcttgttaaccaagcgcaaaacgataagtcaaaagctgaactcctctcggataaagtcgcaggttatttgttttactttgccgtaggaattgggctgatttcatttattgtatggatgcttattcaaaataacgttcgtttttgacacaaaacctcttaacttaatattaagaggtttttcttggatatttaagtctataaacttgtgttataatcaatgtatcataaatatcaaaaatcatgagtttttagacgatgagagacgcgtttatttgcatcgagaactagatttcattagtaagtactcataaaacgattaaaagaggtggtattcaaatggctaaaattggttatgcacgtgtatcaacacaagatcaaagtcttgatggacagattgatacacttgaggaatatggttgtgaacgtatctttagcgagaaagcgagtggtcgcaaaacgaaaagaacggaacttgataagtgtttggattatttacgggaaggagatattctagttatctataaactagatcgtcttggacgtacaacgaaacaattaattgagttatcccaatggttcgatgaaaacagcattgatttacatattattgatatgaatgtatcaacgaaagatgcgatgggcaagatgttctttactatgatgagtgcattcgctgaacttgaagctaacttattaagtgaacgtacgaaaaaaggattagaagcagcacgagcaagagggcgaaaaggcgggaggccttcattacctgaccataagaaaagagaaattaagtttctatacgatgagcaaaaacttacaggagaagaaattgctaaacaaacaggtgtaagtcgttctacagtatataggatgcttaaagattaaactctatgaaaaaatatattacttaaggctcttataggtgtatctaaatcattttatgaacattgattttatgttgagtttttgaacatattatatactgatattcatagattttggattatgaagaaagagtgtacagaaaacagttgttttatgtacactctttcatataaaattaagaggcgtcacattactcgatatatgagaatgaaaatatacagaaaattgtgattttaaagcataaaagagagctaacctataatgggttagctcccttttttagaaaataaatatttatatgccatgattctttttaaaattgttgaataaaataaatgtaatattatggagtataaagttcatcaacaattaaaaccggtttaattacttttcctgaatttgaatcttcagctgcctcatttatgtctttaaaattatagaatttgattaatttatcaaaagggaataaacctcttcgataatattgaataagtttaggtatttcaatttgcgaaactgaatctcccatcaaaacgcctttaattgttctctgagcagcagctaaatttacaaatggtgatgtttcaaaggtcttgtctgttactgcaactaaagcagctacaccgtttttagcaagactgtctctcgcaaattccataacagcaggaactccagttgtatctatcgtgtaattaacacctctttgagaagtaaatttatcaacttgggctaaaacttcttcgtttttactattaattacatgcgttgctcccaattctttagccaattctaatctgttttcatgaatatctactgcaactattggataacaacccgaaattttagctgatataatcgctgataaaccaacagcccctgtaccaaatacagctattgaatctccagctgatggttttaatccattaaatactgttccactaccggttaaaaaaccacaacctaaaggtcccaaaattcttaagtctaaatccttatctacttttactacattgtttctatgagttattgtatattctgtaaatgaagactgattataaaacatatttaaatcttttttatctgatcctttgaaaattttactaccatcaaatgatgtaccactaatattaatttcttcccaataatcacacactgatgggttaccactcaaacaagcttcacagtgaccacaatgaccatctgttagcactacatgatccccttgttcaatatctaaaacgcctggtccaacttcctctacaataccagcaccttcatgacctagtatacctggaaaaccaaaagatgtttgtcctgttctaattgcctcatcagaatgacacattcctgtagcaataattttcaccttaacttcattagctttcacgtccctatttaaggtaacatcttctattttataactagtgtttacctctcttaatacagcagctttcataattaaacactccctttataattaaattatatcactgttacagaagcaatgaaagggtttacattaatcaatttatattcttccatttaattattaaagagactaatctttaaatagtaattcacataaacatatggaggagatttaatgagtaaaaattttgtaaaacattatataaatggtcagcgggtcaaaagtaatagtgaaaatacaatcgacgttataaatccttctactgaagaaattataggtgaaatgatcaatagaaatgagaaagatgtggatgatgctgtagcatctgcaaaaaaagtttatttaaaacttagaaaaacttctattgaagaacgcaaacaatacttgaaaaatatactagttaattcccgtaaaggcgcacttatgcgttctaaaagaacgcgtgcaaaaaccataatcgaccttcgtcgatttttttattttaaaattaaagaaacggcttgagatattccgagcagttataaaaattaatttgtcttgaatattgctactacattcttgaaaaagtgatgtagatttatagcccataacttttttgaaatccatcgacgatacggcgtcgaaagaaaaataaatagaccgtatgaaagaaaaaactacctcactttggcactgaacccttaaaatgggaacttaataaaaacactatgttctaggctgctaattctctgtattttacagggaatatggactgaccccaattggttttttatatagggggcggtatgattataggtagcatgttaggtgcgttgctagcaaatttatttgatgctacattcgtaaatacggtgtatattatcattgctttacttgcgttaatattaatgtttattaacgtgaaatctagtacagaccagtcttcctttaataagcctttattagttattgtgggtcttttcgttggtatcatttccggtatagttggagcaggcggctcctttattattattcctatattattagttttattcaaattaccaatgaatacagttgttgctaatagtataataattgcttttatatcttcaattggcgcctttatcattaaacttatacaaggttacattcctctagaagacgcgttatttttaataataggaagtattattttcgctccgttaggtttaaaattaggtaaaaaagttcctagttttgtacaaaagtggattatcagtattttatttataaaattaaaacattcttatatagcaagtaagttaacaagttactgtaaattcaacaactaaatatgtatggttagggtgtaccacaagtagacatatagataaatattttttacttttttgtgtcactttacttgttatattagaaatattcacctaataaatgagaaaaggagtacatttaaagagttttgttagtattaattatttttcgttttttagtataaatattacatgatttttaactttgcaacagaaccaaaaatttatattcctggcgtaatttttgtcttaatagacgcattacttctcctgttttatttaatgaactaactacatcgtaagtctacgtaccaaattattttcaggtataccatcatcacgaggttacctgttttcttatatattcccttaatacacactattttcaccaacattttttccaaagtgttgcattttccaacgacttaaaacttttaatggtacccgaacgtgggtataacttgttacattatcaaatgtaacattttaaatatgcttaatttgaggtatcggtttaatgtaattgctcacaaatcatcaacatactacccatactttaagcgatataaattaatgaaatagggggaaatgtcttggcaaagctattatacaaactaggaaaatttatagctaagaacaaatggctaagtgttataggatggcttgttatactaggtgtcattatcacgccattaatgataaactcaccgaagtttgacagtgacatcactatgaacggccttaagtcattagacacaaacgataaaattagtaaagaatttcatcaggacagtgagaaagcctcgatgaaaatagtcttccattctaataagaatgatggactcaataataaagatacgaagaaagatattgaagatgctttagacaatatcagacaaaatgatgattatatccaaaatatctctaatccatatgacagtggacaagttaacgatgaaggcgataccgctatcgctaacgtaagttatgtagttccacaaactggattaaaagattcttctaaacatatcatcgacaaagaattaaaagatgtaactgacaaccacaatgtgcaaattgaaaaaactcaaggtagctctatgaatgctgaaattggtggtacatcagaaattgtcggtatcgtcgtagcattcgtaatcttacttattacctttggttcacttatcgcagctggtatgccaattattagtgcaatcatcggtttaggttcaagtgttggtatcatcgcattattaacatatatctttgatattccaaacttcacgcttacactagctgtaatgataggtttagctgttggtattgactactcactctttattctatttagatttaaagaacttaagaaaaaaggtgtcgatactgtagaagctatcgcaacagcagtgggtacagcaggtagtgctgtaatattcgctggtcttacagttatgattgctgtttgtggtttatcacttgtaggaatcgacttcttatcggttatgggatttgcttcatcgattagtgtgttatttgcagtattagcagcattaacactattacctgccctaatcagtatcttccataaaagtattaaaattaaagataaaccatctaaaagtaaagaccctaaagatcatccttgggcaaaatttattgttggtaagccagttatcgctgttattgtaagtttaattattttaattttagctgctataccagtcagtggcatgcgtttaggtattccagatgatagtttaaaaccaactgactcatcagaatacaaagcttataaattgatctcagataattttggcgaaggttataacggacaaattgtcatgttagtaaatacaaaagatggtggaagtaaaagcactatcgaacgtgacttaaataatatgcgtagtgatgtagaagacattgataatgttgatacagtttcaaaagcacaactaactgacaacaacaattacgcattattcacaatcattcctgaaaaaggaccgaactcacagtcaacagaaaatctagtatatgatttacgtgattatcatagccaagcgcaagaaaaatatgactatgacactgaaatttcaggacaaagtgttattaacatcgatatgtcagaaaaactaaacaacgctattccagtatttgcaggcgttatcgttgtattagcattcgtcttattaatgattgtgttccgttcaatcttagttccattaaaagcagtactaggctttatcctttcattaatggctacattaggtttcacaacattagtcattcaacatggctttatgggtagcttatttggtattgaaaacacaggaccattactcgcattccttccagtagtcacaattggattgttattcggacttgccatcgactacgagctcttcttaatgacacgtgtacatgaagaatacagtaagactggcgacaatgatcattcaatccgtgtaggtatcaaagaaagtggacctgttatcgtagctgctgcacttattatgttcagtgtattcatcgcattcgtcttccaagatgacagtgcaattaagtcaatgggtatcgcattaggtttcggtgtgttattcgacgcattcgtcgtacgtatgacattaattccagcattgacgaaactctttggtaaagcttcatggtaccttcctaaatggttaggtgcagtattgccaaacattgacgttgaaggtaaagctttagaagaagataatcatcacgacacatcttctgaaaaaggtcatgtcaacgataaaaataatgaatacgctagacaagacaaagataactatgtttatcaaaatgacaaacgtaaccacaatcgcaattataatgacgaagattataaccgttctgtgcatttagataatcatcatgaccagcatcatcgccaacatcattatgataatcaacgtgatgatatcgactatgaatcactttatactcaagatggcgaccatactcatcatgatgagcgtaattataatgatcgacactatcaagacaattacgatagaaacgatgattatcatgattcaaatttcgataaaacaacaaacttatacaaagaattaactgatagcaatattgatcaagatgtattattcaaagcattaatgttatacgctcgtgaaaacaacaaaggtgtttacgatagatataaccgatcatctcaacatcgtcatgatgacgaacttagagactaatattaaaaaggaggaaacacgttatgttaaaacgacgtagttcgaaattcttaggactactagccacactagccttagctatagtgctaagtgcttgtggtaatagtggtagcggtagtggttcatcagacgatagtcaaacatcacttggtaataaagaaatcgaaataccttatatcgcgagtgataattcaacaccacgttcactagttatagcagaagtattgaaaaaagcaggttatgatgtaacaactacaccagtaacagcaagtggcccgttatatactgctgtatcagagaattctgattcattccatgcatcaggtatcttccctactactgataaaagttactacgataagttcaaaagtaaattaacaatttatgatgataaacatttaattgataacgcaaaagtaggtttagccgtacctaagtacgtgcaagatgtcgactcaattagtgacttaaaaaacagtgacttcggaaaatctgtagattggacaattcaaggcacagacgcacgtaatggcgttatgcaagaaactaaagatgaacttgatagtgacaacttggataaatatagcttgaaagaaagttctgaccaagaccaattcaagaaaattcaatctgcttttaaacaacaagaacctatcgtcttcacatcaatggaacctagttggttctctaaagaattagacgttaaaatgttgaaagatcctgacaacatttatggtaataataatcaacatattgacttagtatttaacaaaaactttaaagaggcacatccagctgcatacacaattgcaacacgtatggcagatgattggagtaaatctgacgaagacaaattagctaaaaaaatctttgttgataacaaaaatccagaacaagtagctaaagactatgtggatgataatgataataaagtagatgaatggttagaagatattgagactaactaattacaaagttaagatagacaaataaagaatatgctcgtttggtgtagcatatttaaaactcataatgcaaatttacagtagcaaaccaagttgagaaggcgcttaagacaaactcttctcaatcgtagctatattgcgagggagtgaaactaaactcagtttcgctcctacttttttatatcgctcttatagtattaaacgtttcaaataacttatttactctttttttataaacaaatttaaacgtagtatcagttgttatgtttggaaaaatcaactttattgtgataaattactcttattacgtcaggctatctgactagattaaataaataggagaatcagataatgccgtcagcaaatcaaaagcgtatgattaaacatattcatgaaacagtgtttatacttttacatgattatcattttgatgaaatcacggttcaaaaaatatgtgatattgcagaaatcaaccgcagtacgttctatagatacttccaagataaatatgaattactctacactttacctgactttattgcacaacaaattatagctaaaggtgacacatcagcagacattacaacctctgaatcatttgaagactttatttattacatttgtaataataaaaagatttttaagcatctattagtttcgtctcgacaggcagatgtatttagaagtttaacgaatgtgggtcgcgaaatgatgttaaataattcaactcgtaagcgtgaccccttagtgcaaaagattagagaaagtaaacatcctgaaattgtagctgatttttacagtagtggcgtaatagaagtactacgacgttgggtagaaaatgactataactatacagttgaagaagtgtttgtaacattaaataatgtgcttgaaacgtcattatattattatgataaataaaagcaatctcacataaattaagagtgagattgcttttttgtcatttgcgttttttaacgtctactgtcttgtaaaccataaaaatactattagctatgattaataatgctagaatgaccattggccaaatacctatattaatcatattaaatatggttctgttgcattcctctacactatgatgttataatgtatttaacaagaatatctgcatttgatgcaccgaacccctcactattctgagtagtgagggggtttttgggtgtggcttagtcgcctatttttacttatcatcacgtttgcgaagccaatacgcaaataatgtgacgatgcaaccacttgctgccgtggtcatgatgtgaacaagaatatctgccatttgatacacctcctctctacgtcaaattgacgcctgagagataggcgacctcactattatatcatctgtgaattgttaatcatatccacttccgataagtcattttatgttgtatgacgatagcgaaatttatttctataatatcgagatactaaaaagatactttataattatatttcaagtttattataatacttaaatacattactataagtatacttaatttaaccgtctctttaatacatacttaaatcgaatataatgacgcgttgtgtagattatacttgtgtaatctacacaaatataaactgaaaaaagatgaaaaatcgaacttaataattgagtttttattaatacgcactaatatatttagaaatcatattatatattcttttaataatgtgatcacaaaaataaaggggccaagtaatttggaatgatggtaaatataatatggttgcattccaagaagaaatgaaatatgaacgttcgtcaggtgtagactttggttcagttgattttgtgaaatattaaaacgtggggatttaggtattgcgactttaacgggatcgaatggagaagtgatatttgtggatgataaggcctaccatgctaatgaacataaagattttattgaattaaaagatgatgaattaacaccttatgcgacagtgacgaaattcaaggcagatacaacataccaaactaaagataaatcatctgaagacgtttttgacgaagttaaagaaaacatattgaatgaaaacttattttcaggtgttaaaatttctggagtattcaaaaaatgcatgttcgcatgatgactggacaagagccgccatatacgcaattaattaattcggcacacagacaacctgaacaaactgaaacgtatgttgaaggaactattgttggtttcttcaggcccgaactattccatggtattggatcttcaggattccatatacactttgcgaatgatgatcgtaacttcggcggccatgtgctagactttgaaacattcgaacaacatttcccaatcaatgatgaaatctttaacaagatggatattgattataaagatattgaagaggaaattagagatgcagaatagtatcttaaaaatcagaagaggagtgtaaattgttatgttagtgcattcatttgatccatttcataatttgttgttatcttcaattattgctgctataccaatcattcttttcttactgtgtttaacagtatttaaaatgaaaggtgtttatgctgcattaacaactttgattataacaatattagtagcattattagtttttaaattacctttgaacattgctggaggagccacatttgaaggtttctatcaaggtattattcccattggttttatagttattatggccgtatggttgtataaaatttctaccgaaagtggtcaatttgatattgtcaaagacagtatagctagtatttcacaagatcaacgtattcaattattactaatcggttttgtatttaatgcatttttagaaggcgcagccggatttggcgtaccaattgctatatgtgccgtattacttgcgcagcttggattcaaacctttagaggcagctatgtattgtttagtaggcaatgctgctgctggggcttacggtgcagtaggaattccagtagctattattgatacgttaaatttatcaggtgatgtttctgctaccgaggtagcactaattggtaatttaactttagggtttattagcttttttgtacctttcttattaatatttatgattgatggattcagaggtattaaagagatattaccatctattttagttgtttctgtaacttatacgtttttacaagtgattataacatcatttgcagggcctgaacttgcagatattatacctggattggcaactatggttgcactagcattattctctagtaagtttcaacctaaaaacatattcagattacaacaaaatgaaaaacctaaacgtgtagctaaacatccatttaaaaatattgtttatgcatggagtcctttcatcattttaactgttattgtacttatatggagttcatcattctttaaaggattatttgaaaagaaaggactattacactctcttgtaattaattttaatgtaccgggtacgatgaatgacgtaacgcatacaccaaatgtactcacttttaattttattgcacaaaccggtacagctatattaattacagccattttgactattattattgcaaataacatgaattttaaaattgctgggaaactattaggattaacagtgaaagaactatggatttctgtattaacaatatgttttatcctagctgtatctaaagtaacgacttatggtggattaagtagtgctatgggccaaggtattgctaaagctggatctgtatttccactattatcaccagttttaggctggataggtgtatttatgactggatcagttgtaaataacaatgcattgtttgctccaatacaagcttctgttgctggacaaattggcgctaaaggatccttgcttgtagcagctaacgtagctggtggtgttacggctaaaattgtatcacctcaatctatagctattgctactgctgcagtcaatgaagtagggaatgaatcacagttaatgaaaatgacaatgcgttttagtataggattattagtatttgtatgcatctggacatttctacttagcttattaataagttaagtagaaatagcaataatattacagaataagtaactattccataaaagaatagttcatattaaaattaagtattttattatctatatattctgtattatactaatattcgtatttaaaagaagggagtcaattatgaatacaaaagagtcaaaaacagttgttgttattggcgctggtgttttaagcacaacttttagttctatgcttaaagaattagaaccaagttggaatataaaactatatgagcgtttagatcgacctggtatcgaaagttcaaatgagcgtcataatgctggaactggtcatgctgctttatgtgaattgaactatacagtgaaacaacctgatggatcaattgatatagaaaaagctaaagaaattaatgaacaatttgaaatctcaaaacaattttggggtcatttagtcaaaaataatagcatttcaaaccctaaagaatttattcaaccattacctcacattagctttgttagaggtaaaaataacgttcaattcttaaaagatcgttatcatgctatgaaggattttccgatgtttgacaatattgaatatacagaagatattgaagaaatgagaaagtggatccccttaatgatggaaggtcatagcgcgagtgatgttatggctgctagtaaaatcaatgaaggtaccgatgttaactttggcgagcttactcgcaaaatggctcaaaatattgaacaacatcctaatgctaatgttcaatataatcacgaagtgatagactttaatcatcgaaaagatggtaaatgggaggttaaagtgcgtcaacgtaacagtggtgatgttcaaattgaacttgctgattatgtatttattggcgcaggtggtggagcaattccactattacaaaagacaggaattccagaaagtaaacatttaggtggattccctattacaggtcaatttttaatttgtactaacccagacatcatagctcagcatgatgccaaagtatatggtaaagaacctcccggcacaccacctatgactgtacctcacttagatactcgttatattgatggtgaacgtacgttactatttggtccatttgctagtgtcggccctaaatttttaaaaaatggttcaaatttagatttatttaaatcagttaaaccatataatattacaacattattatctgctgctgctaaaaatctacctttaatcaaatattcatttgatcaaatattaatgactaaagaaggttgtatgaatcatttacgtactttttatccagaagcacgtgatgaagattggcagttatatacggcgggtaaacgcgtacaagtgattaaagatactcctgaatatggtaaaggctttattcaattcggtacagaagttgttaattctgaagatcattcagtaatagcgttattaggagagtctccaggagcatcaacttcagtatctgtagctctagaagtacttgagagaaacttccctgaatatgagactgaatggacctctaaaatccaaaaaatgattccatcttatggtaaatcactcattaatgatactgcattaatgagaaaaatacgtcaacaaacatcaaaagatttagaattaaattactatcaaaacaataagtagaccacaatacaaagttaaaataaaggaatgttaagcgtgaaaaaattattaatagtaacaattattagtactattggtttttgtgcactcaaacgttaccaaaaacatgtaaaccaagcaccaaatatagaatattaaaattagtttaaaacatttatcatttttattatttttataaaattaaaaaacaatttttttagtgatatttaatagaggtcgcatatatgcgacctcttttttattgtataaagaaagccatacgctatgcgtagggttcagaaaaggttctaccattgtcaaaaaaatacatctctacttgctagaattaatattggtcagccaaccaaaataaacaacacgaggaaatgctttttaatgtcatccgacacaaacagtttagtacatacaaaatcgaattgtaagtatcatagagtctttgctctaaaatatagaaaacaagtgatatttggaaaaatcaaaaaagatatgggtatcattttgcgtcaattatgtgaaagaaaaggtgtataaataattgaagcagagacatgtaaagatcatattcatatgttggtaaatatcccaccaataagaaataaatataatcttttcactaaatataaatagaaaagagcaaaaaggataaatataatcatgaatattgagatagctaataaagtacctgttgcttgctcaatataaactccttttattatatatagtatagctgtaaaagaaaaaatgatgatcattacagcaaagaaaaagatgttagaaatcctatgatactctctatcttatttcatcctcctatatactaattttgcattcctctccactatgatgttataatacatctaacgaagattatatgcatatatgcaccaatcccctcactatttgtggtagtgaggggattttttgatgcggcttaacgtcgcctcctatttattgcgtttactactaagccagtaagtaaaatacgcaactgcacagccactaatgactggtgcaatgatgtgaacgaagatcataagcatattaagcatctccttccgtcgaaaatactgccggaagttaaggcgactctgttattatatcatttgtgaatacgtaagcatatgcacttccgataagttgaattatgtcatctcaaagataaaataagttttcactttcttctcacatactactctattatcactacatccctttttaattctttttcatagactttcctaatttaaaatactacaagtagaaaatagaagtgtatattaaatatctttaaaattagaaaggatatgaaattatatattattaaaaaatctatcatgtttttacatgctcttaggataaattgtagcgttaatagaacaaaactagtctgataaaagtaatctcttgaatatttataatcaatgtgagtatattattaaaaaacttgtaaatatttgaaaggaatggattgaaaatgccgaaagaaaaaataactagagaagaacttggaaagcaaatgatggaaactactataataaaatcaaataaaaaaaaagtaaaaagtccttcgaatgatcaatatgaaagtcttagatcaagaacatctattaaaatacatagagatttcaaaccattatttgatgaattagtagcagaagaacgtgaaaataaaatagattttgtagatgcattattagtattttatgctcaagaaaagcatccagagattttagaagcctttaaaaaccaggaattaaaaacgcaaaaaaatgaaaaagcaaaatatctataaataatgtagtatttattctcactattcatttgtctaccaatgttcctttataagcagtaaataatgcataaagaaagatacgtttaaatgaaaatgaggcaatacacatctaaaatacaaagcgattaacagaaataattaatctgttaatcgctttgtttacttactcaaagaaatcataaattaataatttctgaaaaaggaacccttattctttcttcaatttatataaattagaacatgtttacacataatcaaatatcaaaaatgattttaaaaagaagagattaaaaaatcattagtgaataaacttctaattctttataccaaaatagctccttataaatttaaaaaacataaaatttaacatataaaaatttgcgatttgctttattgctttttaactttttaaaatttttagtatcaattaataacacaaattcattttctataactacttaaatttcgtttttggtgtttcattttgtcaaaaatggcttattctatcagaataaaagttcaaaattctttattctactagaataaaagggtctctgaagccctttaaataggttttatctataagattagggttcacattaacaatgccattcgtaatttatagaataaaaattacttaatgcatttttgtctaatataaatacgctataaatactgttataatagtatttatatagagagcaaatgacgaaggaatggtaagaaaaatacatcagctatgctgattgacacgtcagtggcattgtatttccttatgctcttattttttattctgctttcagcataaagaataaatgatttgtacaaaagttaaatgaataaaaatgattttttcgttatcataatgactcattcttttcataccaaatccctcaattttatctttttccatttttatttgtttaatgatgtccattaaacatgtttgatattttactttattttaaaacgatacgatgattcagtcatttaaaaatgaacttttaaaatatagaaaagcaatttattataacgattccgatcctacacattttccaaaatcaatttcttcttagttatatttacctccatttaaataaaactcttgtatttcttctttaattgatttttcattttccaactacatttgtaattgatttaaaaagacttattaaaaatatacttatgttcaatcattatttaagctatttttaattttgaaaaattatatttgaaacacctaatattattatataaacttactatggtcattgaaattctaattttctttctatatcttcttaagttaatttcattaaataactctcaactttccaatcactctatttactatatactaaaaataactataacagtttataaatgaaaattgagttatttctatatagtatcaagacaagaagaaactcgtttcactcgtttcaaaaccattatttttttgataacataaaaaataaaaaaggagtaataaaaatgaatattatagtctattgtggagctagcaaaggaaatcgagaagaatacgaaaacagtgcaattcaattaggcgaatggatagctaaaaacaatcacactttaatttttggtggtggaaatgcagggctaatggggacattagcaaatactgtaatacataataacggaaaaacgattggtgtaatgcctacattcttacaacaaagagaattagcgcatgataaattagacgaattaataatcgtggaaagtatgtccgaaagaaaagaaataattttggaaaaaggcgatgtatgtatagcactccccggtggtcctgggacgctagaagaaataactgaagttgtatcgtggtcaagagttggtcaaaatgataatccatgtatctttttcaatacaaataactattactcacttatcgaacaattctacgatcaaatggtttcaaatgaatttttaactcaagaagacagagataaaatatttttctcaaactccttcctagaaatcgaagaatttataaaaaactataaagcaccaaaaataagaagttattaatcaaaattgctttattgacgttgagcctcggaacccttaacaatcccaaaacttgtcgaatggtcggcttaatagctcacgctatgccgacattcgtcttcaagtttagttaagggttcttctcaacttcaataaattttctcggcataaaagtcgctaatatccttatttgcaatttcttcaattttttctacaatttttaactccaaattcccttcactctcaataaattctttagcaaaacttcttaattcttcatgatgtccaaccattactgtataaagtgcattttcaaacatagatatatcatttgaatcattaccaaaagctatataatcacctttatctatccctaacattttaagtgcagcccatttatgtatacctttaggacttatatcaagtacattctcattcccatgcttatttacatatacatctaattcatttaattttttactcaataattcattattattcgatgtcaaaatcaaaactttcacaacagattttaaagaatctagattaactaaattagccgaatttaaaggatctaaattttttaatatagaatggttttgaggtccagtatatgcataatcccaatccccatcaattaagtaagtagcatcaaattcgttaattaattgtttaatcttttccatttctgataacgaaaaagaaacagattttataatttttcctttacttaaaataagcgaaccattaccacctatcattgtataatcatgaaaatccttgcttataacgggaagcatatctctaatcggtctcgcagatgcaaaaataacttgatgaccactattcgtaagattttttaaagaattaagaattttatctgatactggttctcccttaaaacaaatagtcccatctaaatcaaacacaaatttcacatttaacgcctccactatattagattagtttttattataatattccttatcaattatgacagaaattttattagcaaattatatctacgaaaagtcttcaaaataaataactttttcgggtctactttgtacactttatctacctggtagacccgattgttattgctttacaagtctaaaattcgtcgttataatctagttaaatcccgtaagggcgcacttacgcgttctaaaagaacacgtgtaaaaaccataatcgaccttcgtcgatttttttaatcttagttttaagtaatcggtgttgcagcacagatataaaaattaatacttcattattagtaatcggcgttgtggcgcagatacaaaaattaatactgcacgaatttgaatcgacgttgtagcgtagatataaaaattaatactacatcaaaatttaactaagatttaagctactagttttttgctagtagcttttttatttttaaaattttaaatacctttattttgaattttaagggggcattttaaagatttaggggtaactcatatagttttatgcctaaaaacttatataaactcttaaaacgcaaatatgagccaaataaatatatgctatttccaaaagcaaagttttgagcaaaaccagtgtcgaatttttgagacactgcccagttacatgcaaattaaaatttgcatagtaaaactggtcaaccatgctggttgaacgctatagttcccgcaagggcaaaaaagcataaaaaaaacgctagcttttaagctaacgtttcaaatcttttaagtaataattttgtttctcaaaattccaaattgcagtaattgaatgtgctttttcttcttcgtctgttgttttatcttcgtcacttgtattaattaaattgccatcttcggcatcgtctaaatttaaaattttatgtttttgtttaagcaatccaccataactcaacatacgttttcggtataaacctttttccaaatcatttacgatttcttgatttctttcatcatcatcagttaaaaaatcagatgacttaaccgggttctgttgcaaagttgaatttatagtataattttaacaaaaaggagtcttctgtatgaactatttcagatataaacaatttaacaaggatgttatcactgtagccgttggctactatctaagatatgcattgaattatcgtgatatatctgaaatattaagggaacgtggtgtaaacgttcatcattcaacggtctaccgttgggttcaagaatatgccccaattttatatcgaatttggaagaaaaagcataaaaaagcttattacaaatggcgtattgatgagacgtacatcaaaataaaaggaaaatggagctatttatatcgtgccattgatgcagagggacatacattagatatttggttgcgtaagcaacgagataatcattcagcatatgcgtttatcaaacgtctcattaaacaatttggtaaacctcaaaaggtaattacagatcaggcaccttcaacgaaggtagcaatggctaaagtaattaaagcttttaaacttaaacctgactgtcattgtacatcgaaatatctgaataacctcattgagcaagatcaccgtcatattaaagtaagaaagacaaggtatcaaagtatcaatacagcaaagaatactttaaaaggtattgaatgtatttacgctctatataaaaagaaccgcaggtctcttcagatctacggattttcgccatgccacgaaattagcatcatgctagcaagttaagcgaacactgacatgataaattagtggttagctatattttttactttgcaacagaactattttgtgtatgaacttgtcgaagacaaatattgccttgataatggtagaccatctatagatcctgttattttagtaaaaatattactcatacaaaggttgtttggcattaaatcaatgaaacaaacaattaaagaaatagaaacaaatgtagcttaccgttggtatttaggatatagctttttagataaagtacctcattacggaacttttagtaagaactatacacgtcgttttcatgatacagatttatttgaacaaatatttgagaaaatactagaaatagctatcaaaaataacttaatagatcactcatctttattcattgattctacacatattaaagcaaatgcaaataagaataaatacatcaaaaaaattgtaaaaaaaagatacacttcacttccaagaagaattggataatgaaataaatgaacaaaggtgatcacaaggaaaaaagccaataaaaaataaaagcaaggaggaatataaaaccaaaaatgtaagtacgactgatccagaaatgtaagtacgactgatccagaaactgggtactacgttaaaggcgaacgagaaaagcaatttgcttatagtttacacgcatgtgtagataaaaatggttatattattgataagcacgtgacacctggtaatattcacgacagtacacaactcaaaccaatgattgaaagattggaaaccaagcaaatgttgcctatcacattagcaattgattcaggttataaaacaccttttaatgcacactttttgcttgaaaaagcaattgtaccagcaataccatatacgagacctaaaggaaaacctggttttttcagaacaaaagatttcatctacgatgaacattatgatacttatatttgtcctaatgatgaaactttactatataaaagaacaatgctaacaggacacagattatatgtatcagatgcttcaatatgtcgagactgtccactactaaataaatgtactgaaagtaaagatgccataaaacaaattagaagacatgtttggcaagatgatttagatatagttgaagatttaaggtttgtggatacaattaaaaaacaatataaaatgcgaagtcaaacaatagagagaagatttggcgatgcaaaagaacagcatggtatgagatggacgagatatagaggacatgacaaagtttccatggataccacgctaatttgtgcttccatgaatcttaaaaaaatcgcaatgtggctaataaaaggcccagtaatggtctgaaagaccactgcaattttgaaaaaactataaaaaaagaaaataaataaacccttcgcattaacttgcgaagggtttgtccacgttctgaggcattacatacttatttgtatgtaatgcctttttttaatagtatatgaagtcctctgctatctttccagtctagtaaacaaaaaataaatcagtatttttaataaggtactatttttttaatgacatattaaatctattaatgaattgttcatgttcaatttcattcgcataatccttttgtaattgtaacctggtttgatatgttttactactattagccatttttttcaacattactgtcaagttattaatgtatttttccataacaatattttcaggggctgtaaacatacgattatgtgcttcatcatgggttgcaaatatcaccatatcattttcaaatgctctgctgactgcatccaatagctcattacctttattattatcgagataaatatcacattgttgatataatgattcaattgtttcttcgtctgccactggatacaatcgaacattatcaaatttcactaattctaataatttattagacatttctgtaatagccgctatatgaaattgatagttgctattgtttttcactaattcttcaacacaagacaattggtctgaatttgttaaagttaatatatttctactaaactggttttgttttcgataatcataaaggtaaccacctctatgtactttatctcgttctctatcatcaagtctttggcatattgttagatattcaatactatcaggtatcattacagaataatttctatttagatattcatcaaacataagtttcatatttccaggtacgttaccatggctgttttcttgccaaacgagaattccttttccaattgtatccattctatataacgcgataaaaggcatcgctagtgaattaaagataactacatccaaatctacattgagttgttttaaataatatatgacaaatgattcttgagacttgaaaaagtgtgtctcgtttttccaatttaatacatagtctccggtcacacaattttcatagataatttctttgcctagacgatcaaagtactttttcattatagctttaccagtcaaatcatagataacctcagcaaatttaaacccattcttattatagaaatcaactgtgcgtaatcgttgcttattatccaaccactcaactcgacttacaatacgagacttgaaattaggttgatagaaaattttacctctaacttctcctaaattttttatttcacccatatcatttgtacctgtaatttcccagtaagttggcacctctacttcattaaagaataaaggattatcacttgggttagttggattttgagcaaaaaattggtaaggagaggtaacatcatctggtaaaaaaccgtcatcctctaaacaaattgtcaaatgttgatatcctgcaagtttcaatgaacggtgtaataattgtgatttaaaatgataattatcaaatatattaatcatgtagcacctctttaattagcatatcccatttttctactattttctgagttaaaaattcactagcaatttcatatgatgtgctttctggatgtttaggcccatttttaaaatatttcacaatatatgaagctagttcattaatcttttcttctttatctgcagattctatattttcagacataagatatccattttcactattacgaataaatgttggattaccataattaacattaaatccaatcattcctaagccagaacccacagcctccattaatgtcaaaccgaaaccttcactttgtgaagcagatacaaataattcatactttgaataaacgtcctgcaaattaacatggccctttaatgtaatatagtcttgtgcattattttcataaacaatttgttctattttatctttttctccaccttgaccatatatatcaaacgttaatttaggaatctcttttttggctttcacaactgctttagcaatccagtctacatgtttctctttagctagtcgtgatgctgttatcattgaatatggtcgtctctttttctctggataaataagttgatttaagctaccgacaggaactgttctgattagtggattatcatgagtatatttagaaaaatgttgacttaaaatacgattttgtaaatcggtcgcagtaataaagaagtccacaaattttgcatttctaaattgatattcatagtagttattccacaatatattatcgccatcagtggcattatcactaaagtgttctgcatgaactaccacacctaatttgctagcacctttattttgtaatactgcttggccaatttctgtagctctatctaggattacgatatctctatttgataaatttaatttattcaagaaatatgcaacaaattctgctttactatagagttgtgcatcattaaagacaaagacactttctttatcatctatatattccttatatgcaattgttccatcttcattgtaaaactgtctcatatatatcttggcataattttgataaggggaataatattcagaaaaaactcttgtataactaaagaaatcttttcttactaaataaccttcaaggacaaactccactctatctacataatttttatctgcatttttcatatagcacgttgcaaaggaacttttatcaccatcgaaatacaatcttttgattttaccgttatcctctatttgagtaatttcgttaccgatttcacccattaaatcatctaaagtatatgttgttggtgcaatttttatattactaaaatattgatataaccaaattacttcatcatctttaaatcctaagttatcagtcaatgtttggatattttcagaagatatgaaatctaaaaaaataaattttacatttctatccaactgtctcaacaaattagctctatatgcttgtgcatattcaataccactacttgcccaacctattccaaaatttatattatatacagtcatagtatccccctcttattttatgggaaataaatcataagatctccatgtttatcaaacgttataatacttaaacataaatttcttataatatttctctttaatgtaattgtcatagcctcatatgactctaatgcaactttatgatattcatatacggcatttctttgaccattttggcgattattaacactagcttttagttgctgaagataatcgacttgttcaatccatgctatatcgattgctttgataattgatttttgaatgaaacgtaatatgaaatatgggtctgctgctttcttttgattatccccaaattgctgcataaaatgttgtattaaaaaattaataattgattcttggttatatacatctattttttcgttattcgattcaaaattgaaagataagtttttataaacataattaattacatctttttcatcatttatattaaagttttttaaatctcttctaaaaacatctttcgccaattccttataatcaaattggtttttgtcaaccatatctaaaattaaatctctttctttataaattaaatctctttgtacacttatacttttttcaaattcattagccatttcacgttgaacaatggaagtctcttctgaaacagtttgtgctttatttacaatattttttactctcaattggaaaattttactattttccaaagtttcactactaatttgattcaacttgtcgttctctagcagtttagattggctccactttttaacaatgtaatcatctaatgatacaaatatttgagatacaccagggtcaccttgtcgaccagcgcgtcctcttagctgtctatctacacgactattttccatgtgttcattaataatcaccgctaagccaccaatttcatgaacaccttgtgccaatttaatatctgtaccacgtcctgccatactagtagccacagtaactgattctctattgcctgcttctgcaatcatttgagcttctttagaaacattttgagcaattaataggttattaggtatatctaattggaatagattatccgaaaaatattcagctgcttctgcagttctagttattaaaagaactggctgagatttttggtttttttcaactataacatcaatgatagcttgatttttttcttccatatttgcgaatactctatcttccaaatcttgtctctgaataggtttgtcggtgggaatctcaactacaattttcgaatataactcaaaaaattctttttctccttgtttgcctgtaccagtcattccagcaaatttgtcaaagagtttgaataggttttggaatgtaattgtagccatcacactcttatcaatagataattcaacatcttccttagcttcaattgcttggtgcaaacctgactgtaatttcgtacctggaagcattcgccccgtaatcctatctattaacacaatctctccatttgatacaaaataatctaaattgtaatcaaatagatactttgctctcaatgataaattgataatacgaaccaaatcaaaattactttcatcatatagatggtgaactttaaaatagtcattcgctttatcaataccctgtttttttagccaaatttcttttttatttttatttagtttaaaatgttgcccatctttaagtgtatgtacaaattcttttacaatatcaaataaattagattgcaatcgtggtgcaccggatataactagtggtgtttgtgctgcatctaaaatgattgaatcaacttcatctaaaattgcaaaatgtaattcaggtaaaaatttagttcgcttgtgatctgctaaattatctgtaagataatcaaagcccaaacgcccatttgtagtataaatgatgtcatgtgcatatagtttttgcttttcaccagcttcatattcatagtctggaatgtctataaatcccaatgatgtagttaaacctaaccattcatacaatggtttcatttccatgcaatctcttttggctaagtaatcattagtcgtaattaaaaatgctcttttacctgttaatgcatttaaatataagggcatcgttgcagttagagtttttccttctccggtttgcatttctgctatatttccctgatgcattactatagctcctagtacctgaacatctttagggtacatgcctaatacacgataggcagattctcttaccacagcatatgcctctggcaaaatttgatctaatgtctctttagattctattattctctttttaaattcttgagtttttgcttttaatgctccatcagtatattcagaaaaaacatgactcattttattgatactatttaatgttttgtttagtttttttaaccgcattttattaatagtattctcaaatttacctgtcatttggacacctctttctgaattttatattttattgtgtctgattttatcaatcgttttactaatatcagttagtatagttgaatgactgctctctacatgttggtcttcaataatagttcggtaaaattgtaaatgctgaaatccagcattcattaattcaatcttataagaataggcatcttttggatattcaaactcaatatcatcatcttcgacaatcatagttttaattttttcaccattctttttatataaaataattttaaaatacactgatctttcaggtatgacatcataatcaaacttaattttataattgttcccttttttcaatagcggtaatgaaggcacttgtttattagttgtataatttgataacatgttccattcatgtatcaccattcctgagggcatcaaagaattgtccatactgacaaaattgttattaaattttagcttagctccatacataaaagtatttttatgtatctttttccaggtgatatcaaatcgcttattttggttcatattactctctcccgaattgattatttaaaataatatgataaaagtttacgaaccaactggttatcgttgctgagtcatcattatgcctaccaggcacgcctcgtgtcatgacatgcgttttggattctcctagcacagatattaaatcatcaaaggctatatcatcataatcatcattttgcatatatgcgatagcaaaagtagtattttcaaattcattttgcttaaatttttcccaaaaacgcatattcaaatgattgatattttccttactaaatgtgccttcttgtgacatcaaaatgtctagtgctgttccaaaaccattgggtcgttttagtttcatattttcagcaattctaccaacattcagtaatggcttaccaacaatcacagctctcgggtttaattgtgcactatagtataatgcgccaaatgaccccatcgacagtccagataatatcaaatcatcttctttaaagtttaaatattccaatgtttctttaataactttttttatgctattttcataggtttcagatccaagatagaaggatccaccttcgattctaggatccccaataagtagaaatggagcatctagactattcatcataaaatacccttcaaacccttctaatgaacgataaccactaaaatatacatttaatggaggctttaaatcgccaggattgaaatagtgtatatactcttcgccgttttcatcgttataacgttgaccacccattataaattgacccatctctgcacgagaccaccttttatggattgccctaagatgtacaacacctgttccctttgcttttactactatagaaatgtttgcatcataagatcttggcatcaattccaaaggctgttttaaatcatcctttgtcaggataataacatctttcgtatgttctaatgagccaaatgggattaatctaattatatattggacatcaacatttccctctacaaaaaattctggccataactgtatcatcatattcttatcgtaaactaagttttggttccagctaacaattggcgtatacaactctccaaaatttccagacaaaacgagttccttgttaccaaagtactcaaattctccttcaaaattaggatttacctctcctttaattggcgagactttatctccgtattgcttagtaaaagcgcccgcttttaatttatgatgcaactcatctgttgatttataaaataatggtttaataaatttatattttactcgagaatcattttcgaattgaaaatcccagtatttttcatctacataaatcgtatatggttctcccactatttcaataactttcatcaattctttagaatatgttgtttgaataaatactaaattaaaggaaccaacttcatctattaaattttcaattgcttcttcataaccactttcaaatgtgaatagtattggatcaaggtaatcgatgtacacgttttttttatcatggaaaataggttctagatcttctccaccgatttgcaatatgttaaattttctagccatataactctccttttatcaaacggtccacttctcttattatcttagtcgaactaaactcatctactaattttatggaatatgcataagaataattccagtttttcaaacttagtaagaagtaatctaacgcccgtatcatattagatgaacttggtattattactccgtttacattagatgtcacataatccgtttctatcatattaatttgaggtactcctgcactgattgcgctaatttgcagatataaatctggttcatcacccaaatctataactactcttaattgtgacattactttaattaaatcttcttcaaataagaccgattcaattttaattatttttataaattccatttcttcttctaacacatcagccatttcttcacttaaagttctttgttcttcattatataattcatttttttcttttactatgtctgataaccattttggtgttttgcttgttatatctttcattaaaatagtaactctatagttttctttatttttaatataactatataactgatctattacaggttctactacatctcttgataaattatctatccaaaaaccaatatgcacatcatataactgagaacttatatttggaattttttcagtatcaaagggtgtaattctagacattttcatgtcaattgaattgttattaaaaataagactacattctctttcattttcttttgtgtcaactaaacaactttttgcaggttgcatggattcaattaaatatggggttatttctctatttctatttgaaaatagagaaaaacataattgatttgcttcaaaataacgtgtaattaactgattgtgtctttcatcggaagcagcaataaaatcatctgattgtgttatttgatctttataaaatttttcaacaatctcttctattatttccaacatatttaaatatttactatggtctaataaacctttaactggattattaactaatacttctcctgttattaagttctcagttagaatcttttcccctaatacatttaaataaatttgttcaacctcagtattattttcatatttaataattgaagatataaaccctctatcgtcaaatatcatcttttgttgttgcaatccattttcatattcatgtatatgaagtacatatccctcttgattaaacgtaatttgagaatacgtattttcacctataactgtttctaccataaacggcgaatatacaaactctgtatctttaggccaattcaaatctaaataatcaatagctctaggtaatgtgtttggagcactttgtaacacatcaaaaacagaccaataatcactttcaaataaatcatgtctatgtaaaaacaaccttaaattaggtgaataatttaatactagtaacttatattcataaccatttttcttatgcatagacattaagctaatcatgtcatcaaaatctgttttatccggcttataataaaagggaagagtattgtctttccacaatttttgtccactataccacgatggtataaaatatctcattaaaaattcctccctaatatttgtctaatatgcttttatatctattaaaataagaatatgctcttaatgtttcagttatacttatactaatataaatcactataataagttgtattgaaaaatatatttcttttgaaagttctggaaccaataatgaacaatataagggtattgctaaaatcaatgtcacagtaattgaaccaaaccagcaaattcttcttgcttttatatttaaatatcgctcagtttcttcgccagggctaatacctgcaaagtaatttccattttttaaaaattctttagattttcttttagtattgatcaaaaatctagatagtaagtatccaaaaatgatttgtattacaatatatactgtaatacctacaggattatcaaatccaaaaatggctacattcatttccttattcaaaagtaattttccaattaagttaataacactatttaacaatagaaacaaagataaacttatcattatagatatactccctgctggatttaatttccaggcaagatatgaatgtgaagtttgtgtagacatattcattatatctttataatgaagtcgatactctgatagttctatatagagaagtattagcatcgctataactagtaatccaatcacaataaataatgttgctgttacatttatactagatagttgttgatgaaataaagattttatcaaactcattaatacaattggcattggtccaccaattccataattaatattttgatcagctaaccagactaatagtaatgtccctgttaataaaactaatacaagtaacagaatatttgtgctctgtattatattattctgaatataggtatggataacatagtatgcttgtatcattgctataagtattgttaatagtctttcctttatttgtttttccgaacgagtctgcttaacaatattatctacatctctatagttgaatagcatgataataatcattgctgttagccacggtcctaaccccaatgaaaatatgttcaatgaacttaaatctccaccgacatttgaaacagctaatttaaaaaagctatcatggttggatttaattgattcattaccaatgatagaaatattacttccaagtatatatataaaaagaatgaacattgtaaaaataattcttttgtgtaaaatcttgaattctttattttttaacatattttcacctaaaattcttatattttaatatgagtgcaaagaggctaaaaacatagttgatttactatcatgtaaattcaacattatgtcttagcctctttgttttacttcatattattatagattaaaatctattattatttttatcttctttatttttacgtgatctttttattaaacctaatccagcaagtaatgagagaacagctcccattaatctgtttgtattattagcatcattgctattaccagtttcaggaagttctttattttcatcactattatctttgtgacttgattgttgggctacattagatgcgtttctactttcttcagttgatgtactgttagaagttgcattcgaattgacatttgacgcactatctgaagcacttactgacgctgagtcagattcacttactgatcctgaatctgattcacttgtgcttagtgacgcactatctgattcacttactgacgctgagtcagacgcgcttactgacgctgaatctgattcacttgtgcttagtgatgcactatctgattcacttactgatgctgagtcagatgcacttactgacgctgaatctgattcacttgtgcttagtgacgcactatctgattcacttactgatgctgagtcgctcgcacttgttgacgcactatctgattcacttactgatgctgagtcgctcgcacttgttgacgcactatctgattcacttactgacgctgagtcagatgcgcttactgacgctgaatctgattcacttactgacgctgaatctgattcacttactgatgctgagtcgctcgcacttgttgacgcactatctgattcacttactgatgctgagtcagatgcgcttactgacgctgagtcagattcacttactgatgctgagtcagattcacttactgatgctgagtcgctcgcacttgttgacgcactatctgattcacttactgacgctgaatctgattcacttactgatgctgagtcgctcgcacttgttgacgcactatctgattcacttgtgcttagtgacgcactatctgattcacttactgatgctgagtcagatgcgcttactgacgctgagtcagattcacttactgatgctgagtcgctcgcacttgttgacgcactatctgattcacttactgacgctgagtcagatgcgcttactgacgctgagtcagattcacttactgacgctgagtcagatgcgcttactgacgctgaatctgatgcacttactgacgctgaatctgattcacttactgatgctgagtcgctcgcacttgttgacgcactatctgattcacttactgatgctgagtcagattcacttactgatgctgaatctgatgcacttactgacgctgaatctgattcacttactgatgctgagtcgctcgcacttgttgacgcactatctgattcacttactgacgctgaatctgattcacttactgatgctgagtcgctcgcacttgttgacgcactatctgattcacttactgacgctgagtcagattcacttactgatgctgagtcgctcgcacttgttgacgcactatctgattcacttactgatgctgagtcagatgcgcttactgacgctgagtcagattcacttactgacgctgagtcagatgcgcttactgacgctgaatctgatgcacttactgacgctgagtcagattcacttactgatgctgaatctgatgcacttactgacgctgaatctgattcacttactgatgctgagtcagattcacttactgatgctgaatctgatgcacttactgacgctgaatctgattcacttactgatgctgagtcagattcacttactgatgctgagtcagattcacttactgatgctgagtcgctcgcacttgttgacgcactatctgattcacttactgacgctgagtcgctcgcacttgttgacgcactatctgattcacttactgatgctgagtcagattcacttactgatgctgaatctgattcacttactgacgctgaatctgattcacttactgatgctgagtcgctcgcacttgttgacgcactatctgattcacttgtgcttagtgacgcactatctgattcacttactgatgctgagtcagatgcgcttactgacgctgagtcagattcacttactgatgctgagtcagattcacttactgatgctgagtcgctcgcacttgttgacgcactatctgattcacttactgacgctgagtcagatgcgcttactgacgctgagtcagattcacttactgatgctgagtcagattcacttactgatgctgagtcgctcgcacttgttgacgcactatctgattcacttactgacgctgagtcagatgcgcttactgacgctgagtcagattcacttactgacgctgagtcagatgcgcttactgacgctgaatctgatgcacttactgacgctgaatctgattcac

SEQ ID NO: 47 - DNA, 165280 bp, Staphylococcus saprophyticus
gatattgatgtcttctggtccaataccatccatcggcgaaatagatccatgcaagacatgatataaacctttatattctctcatcttttccattgcaataacatctttatcatcttcgactacacaaataaccgagcgatctcgttgtttatcctgacatatatagcaaggatcctgttctgtaatatgcccacactcactacaataagtaagttctcgtttcacatctactaatgccttagcaaattgtacaacgtcatcttctttcatatctaatacatgaaacgccagacgttgagctgtttttggcccaatgcctggcagtttcatgaaactgtcaattagtttcgaaattggttcaggatagtgcatatgatcacattccagggatgtttaagccttgcgtatgcttacctaaacgttcttgtgtaagttcatcagctttattcattgcctcattcgttgcagcaattactaagtcttgtaacatttcaatatcatcagggtctaccgcttcttctttaatttccacgtcaagcacctctttatgaccagaaactgttacagtaaccataccgccaccagctgtaccttgtactttttcttctttaagcttttcttgctcttcgcccattttcttttgcattttttgcatttgtttcatcatttgttgcatatttccgccaccgcgcataaatatatcctccttaaaacttatatattatattgaatatcattcatctttcgtttcattatacatgcctttttaatcattgtcatgtatcactcttcatctatgatatttaccgtactttcaccaaataggtctttcgctttctgaactacgtctacttcttcaggttctgttgtatccgtaccattgttatgtgtatcttctgatgtaccttgcttcctattttgaaggtattctgatctcacacgcatccactggtctgcaggtacaccaaccactttaacggttttatctataatattacaaacaacattttcgatattttcacgtttttcatcgtctttattcacgatttcacaatgaatttcttcttctaatttaattagtacatgcgtttcacttgcagccaccggttcagaattttgtaaaagactgaccaatgacttcatatcattacttttagcatgatcaaccacttcttgccagtgatctttaagctgcttgatatcacctttattagctttatctaatactttagcaatttgctgcatagaaaatgcatttttagactgactacttttagttgtagaacgttttgattgttgtggttgcgcactcgttgttacaccattcgctttaagtgtttttaattcactttctaattgttccattctttgcagtaacacatcattgtttggttctgttgctacacttgtagtcgctaatgtttgaacactttctggtttttcttttatcatttctgcgatttttactaacaagacttcaaaatgcacactttggtttacgctaaatctaatagaaacgagtgtatcattaatgatatcaatcattttgtaaagtacttctaaatcaaaatgcatcagcgcatcatattcagtttcttcattagatgtcttattcatgattgtatctctgacaaagtagatcatatcgttaatcaaacgatttacttctttaccttgtgagatgaattgatgatacgtagagaaggcgtttctcacatcaccttctacaacttccttaaataattcatttaaagctttcgcatctacactaccagtaacattcaatgcatcttctaacgttaaatgttcatctccaaaagcaattgcttggtccatgatactcaatgcatcacgcataccaccttcggatgctttggcgataaagtttaatgccgcttcatcatattcaatcgcttgcgattccgctacaaactttaatctttccacaatttcttcctggcttatcgctttaaaatcaaatctttgagctcttgatattattgtcggaggtattttatgtggttctgtcgttgctaagataaatatagcgtgtgctggtggttcttccaatgttttaagcaatgcattgaaagcacctgtagttagcatatgcacttcatcaataatataaactttaaactttgattcgctcggcgcatattttactttatctctaatatttctaatctcatctacaccattattactcgcagcgtcaatttcaatcacatctgagttagtccctcgtgtaatccctttacaaattgcgcattcattacacggttcgccatctgaacgttcaagacagttaattgctttcgcaaacactttcgcaatacttgtcttacctgtccctcttggaccactgaaaatgtatgcatgggattgtttctcttttgaaattgcattgcgtagtgttttagttacatgttcttgacctacaacatcttcgaaactctgcggtcggaacattctatataaagcttgataattcactttcgcacctccaattgcattcacaaactattatagcattgaacttcgtactttgaatatcaattaaaagcttctgagtacacgacatcaccttgaggctgttctaatagttgatcccacaggaattttaccatgaaatattctgaaggcacgtcaaatggacatgttatgtcataatctgctgctggttcgtatccaaactgattataatattttgggtcacctagcactataatggttgtatagtcttgtgttttcgcacgttcttctacagcttgtatcaacgccttacccaagcctttatttctatattccggcaatactgatagtggggctaatgccagaacagtatatcgcttcgttccattaatgactgttatttcagatagcataatgtgaccgaccacatcaccgtcattatttttagctaccacttcaagctcataattatactcaggtgcgttcctcagtttagctaccaaattttgttcatcatgattcgactctgtaacatctgcaaatgctgcttcgattgctttcaagcttgtgtcataatcattttcagttagcgtacttaaatatatttgcattggtttcccccccaaacgttcagttcaagcctttaatgtcataacatcgatttccaacaagttttaagacggttccaatatgccatcaaagtattgtttatattttaatataaaaaaagagtgaccgctatcaaaagataagtcactctttatatatgtatatgatttcattagttttaaaaattaaaaccgtgcaccttcgcttcgaatgcgtatcacaaacgttaccaaagtcgacagctaaatctcggcaaccctacggcacatacgatgatccacttaatgctgcttccgtcaggacctgacatgattcatgggttcatattgcataggaccgagatcttcagacactacgtgctttgggcagacttcacaaaaacgcaccctcagcaaaggaattaagtctcgcataaagcggatttcgagtacagggaaccgctacctccccacctagcacggcaagatatatcatactataatctcatattagaatgcaagtattaccttttgcatggctagtaaaacctttacaaatccttcacacatcagtcttatcattgtacatttatagtttatgacgtctagaaaaatcattgaatttaaattcggtcgctaaatgtttagaaatattatactgaaatatcgtagtgtcttttaaatgaacaatgccacgtaccgtcgctgtatacgctggattgatttcaccaaacacttcatactccatctctccaaacggttcaaatgttatggatttgtttgaataactaatttccaaccctaatgtttcctcaatgtattgatataaagagtttgtagcaatttccgctgtaacattcggcacaatttcttctattagatagtcttcatcaatgatttttactctatcatctatttttctagtacgtaccacatgacataagacagtattcatactaatatttaaagcttctttgactctcggaacatcgcccgcagtaatgctttcgatcatcttcacttctgtgtcatgctgtaaacctagtccgcgttgcacttctctaaaactggttaagtcagcaaaaggaaattctgttacaccttgataaataacaatagaacctttccctcgaatcttttgtatcattccttctctaacgagtaaatttagcgctttacgcacagtttcacgtgatgcctgataagattctaccaattcatgttccgatggcaattgagcaccatacgatatacgtgattcaataatatctttccgcaatgtttcatatatcgtaataaatttcttctgtgtcatcgtttcgctcactgccttttatagattattgtgcaactactatgacgccaaatccatcaatctttccatctatcaactggccatattgcactatgacttcgccatctaactttaatccttctggtatttctatgcgttcttttgaaaagtttgcaagcactatccaagtttcacctttataatgacgtttatatataaacaattcattgtgatccatgtatagtggttcaatatttccataagtaataatgtcatgctcatggcgtaattgaattaaatgtcgatatgtctgaagtatggattgttcatcttcaacagctgcttcaacgtttattttatcaaaattattagggatatcaatccatggtgtacctgaagtgaaaccagcatgttcacctgctgtccattgaacaggcgttctagaattatcacgtgatttttgtccaagaatagttaaaatttcttgctcctcatatcctgctgctttcattttgtcataagcatttaaagattcaacatcacgatactgtttaatgtcattaaagcctggatccgtcataccaatttcttcgccttggtaaatatatggcgtcccttgcaacatatgcagtacagtcgctagcatcttagcactttgtttacgtagtggttcagatgtgtcatcaccaaaacgcgtaacgacacgaggctgatcgtgattacaccaaaatatcgcgttccaaccgccaccttcataaataccaagttgccactccattagaatgtctttcaacttatgaaaatctaatttagcattcgaccatttttctccgtctacataatctactttaagatgatgaaaattaaacacactacttaattcttgtcgttcaggcgaagtatatttcacacaatgatctatggttgtcgaagacatttcgccaacagtcattaattgtttatcaccaaatgtttgctgattcatttcgtgtaaatagtcatgaacacgtggaccatctgtatagaattctttgccgattttttcggagtttttaaattcaccttttgaaatgaggttaatgacgtcgaatcgaaaaccatctattccaaaatcaatccagtgattaatgatgtcgtatagcacacgtctgacttcaggattatcccagttcaaatctgcttgtgtcacatcaaataaatgtaaataatattcatccgttttttcatcatatttccaggcatttccaccaaatttggattcccaattcgtaggtggttcttcatttgccgatcttctaaagaaataataatctctataaggactatttttatcagcatatgcttgtttaaaccattcatgctctgttgacgtatggttgatcacgatgtccatcataaccttgatatctcttttatgcgcttcagccactagcatttctaaatcttcaattgtcccaaacttctcattcactttataatagttgctaatatcataaccattatcattcataggcgattcatataccggtgttagccaaatatagtccacaccgagatattgtatataatctaatttttcaataattccttgtaagtcaccttcaccactacctgtcgtatcattaaatgacttcggataaatttgataaacgactgattttctccaatcattttgttgcatattattgccacctctacttttaatattttaaaaaagaaacccgctaagtaattttagcgagtttaattgtacttctctgtcgttgacgcctattcttcaaccatttctttcgcttcttctttactaaatcttgataggaatactgttaatatggcaggaactacaaatgctatagctgtcactactaaatatactccccagtattcactttttattgaaataaatgctggaagaccaccaacaccaacactacctagcacacgcgtcgcacctaatactgcacctaagatacaagaagttgtaatcgcggcgataaatggatatttcagtggtaaattcaccccaaatagtgcaggttctgtgacacctaagaaacctgaaacgcctgaagtcattgctaaaccttgttctttgaccattttacgtcttctataaacgaaccaagcaccaaatgctgcagaaccttggcagatattagaaattgcaagaattggccacagatatgtgccaccaagctgactacccattaattggaaatcaactgctaagaacatatggtgtaaaccagtaataactaatggtgcatagaacaaaccatagatggcaccacctaaccaaccagcatgttcaaacacaaatgttacgccatttgtgatgccagtacctagccataacgcaacaggaccaataacaataaatgctaagaaccctgtaatcaatagtgctacaggtccaacgaccaacattttaattgaatcatgcacaaatttatttaagaatttttcaatctgcgctaatacatatgcagcaagcaagatcggtaatacctgtccttgatagtttaattgcttaatttctaaaccaagtatatcccaggttggaatatgacctttcgctatatcgtattgtgatacaagctgtggattcattaaaatcaagcctaaaaccaaaccgagaatttgactcccaccaaacacacgcatactactccaaccgattaacgcgggtaagaatatgaacgctgtacttgcaatgacattaataatattcgaaatatcacctagctgcggaaattgttctaccagtggctttggaccaaataacccttccatcgtcagtaagttattaatccccatcagtaaaccagcagttacgattgcaggtaaaatcggtataaagatatctcccaataacttaatcaacctttgaatcggatttcctttcttcgccgctgccgcttttgcatcatccttagatgcttcactgacacctgtttcttggatgaattgcttgtaaacttcatctactgtgccaggtccaataacgatttggtattggttgtctgctttaaattgtcctttcactaaatcattattgctcaatctatctttatctactttatcatcatctttcaagaccagtcttagacgtgtcacacaatgtgttgctgtgtccaagttgtctttgcccccaatagcttcgacgatatcttgtacatctttctttttaacagccatgatgattcactcccttataattaaactttagatattactagaagtataacttgtctatacaagttttgtaaaggttttcataaaaggggggggtgctcgtcgactacagggctacaatctaaatatttaaaaccacctataacaatgagttggcgttattagggggctcaaattatagatggttacatcataatcatgtacttctttgataaatttacggaaatgaccttacatcttttttctatataaaagtacttagcctaacttaaatttcgaatatgtagaaaagcgcattaaaaaagcaagcatccaaatttttcattgaatacttgctttatctatatcattagtcttggtattttaaatataatggcggaggaagagggattcgaacccccgcgggccgttaagcccctgttggttttcaagaccaatcccttcagccggacttgggtattcctccaaacacaatatttataatattatagtccatgacaaaagtcaattaaaatcattaccttatactaatgttttttcttttaaatattcatccactgcatttgcgacagctcttccttcttgaatagcccataccacaagactttgacctcttctagcgtctccagcagcaaaaatgttcggttgattggttctaaaatctttgttgtcagctacaattttgtttctttctgtttgaatattaaaagcatgcggtactgttgtttctgtacctatgaaaccaatcgataacaatactagatctgcaggccaatggcgttctgttccatctacgaccaccatgccttcgtctgtttcttccagaatttgagtataaacacctttcacattaccaatacggtcaacatcataacgcatcgtttgcacaccataagcacgcggctcaaatccaaagcgctgttcatattctttatgcgcgtaatccattttgaatactggcattgctaatggccaataggtattttcatcaaattcaatcgcttcaggttgtttcgtatacttattaaattggacgatagacttacagttttcacgaagtgctgttgcaacacaatcggctcccgtgtctcccgctccaataacgaccacatttttaccttctgcagaaatcgttggttccttgatttcaccattcaaatactgaccttgctccgtcaaataatccatcgcaaaatgtatgccgaatcccatacgcccttctaatggtaaatctctcgcattttgagatcctgtacataagatgattgcgtcatgtttctcttctaatgcttctctactcacgtcgacaccaatctctgtatctgtttcaaatcggatgcccgaagcttccataatagatattctacgacgcacgacatctttatctaatttcatattaggtatgccatacatcagtagaccgcccgcttcatgcgcacgttcatataccgttacatgataacctaatttattaagttcttctgctgccgttaatcctgctgggccactaccaacgatggctacagactcatctttacgttgttctggcacaattggtttaacccaaccgttttcatatgcttcatcaataatcgttctttcaatacctttaatagctactgattcacgatttattttcataacacatgattgttcacatggcgctgggcatactctacctgtaaattctggaaaattattcgtttcacttaatcgctcatatgccgtcttaaaatcttgtctataaactaaatcattccattcaggtatatagttaccgataggacaaccaatcgtttctctgccaaatggttcacctgtctgacaaaatggcgtaccacaatccatacaacgtgcaccttgttgtgcagcttcgtcttttgtaaacctttgctggaatgcgtcatgatttttcaaacgatcaactaaagataattcgtgtaattgttgtttgtcataattcataaatcctttaaattcacccatgacaatccctcctttacgatttaatatacggctgttttttgttgttctgacattaagtgcgtacgcttatcattaaaggcatttaataaagcttcatccaaagcatccgtctgttgtttttgcaaatctatcttttgcatcattaatttataatcttttggtatcacttttactaccttatctgcaatatgatcaaaatctgctaatatctctttcgctttagtactgtcggtatatttaacgtgtgcttctaacatatctttgacgacgttgcgttcttcatctactgttatcgcatcaaagtctaaactctcaagttgattctgcgctttaaattgcgctacatcagatggaaaaacataactaacgccaccactcataccttgaccaaagtttttacctacgtctcctaatataatgattctgcctccagtcatgtattcaagaccgtgatctccgataccttccacgacggcttggacaccactattacgaatacagaaacgctcgccagctttaccattaataaaagctttaccgtgagatgcgccataaaaacaaacattacctacgataatttcattttcacgttgttgattaggtgctttaacaattacttttccgcccgataagccttttccaacatagtcattagcatcacctgtatgatgaattgtcagtccgcttggtgtatacgcagctaaactttgacctgcatgacccgtcgtttgtgcatatatcgtgtcttcactcaatccttctgctccatgcgctcttgtaatcatactgccagtaataacacccacatcacgctgttcattgtttaagcgatattgaccttcgaatgattggccagatcttatcgctgtttgtgcatcaggatacaattcagttaagtcaaatcctatatctaaatgatgattttgttcaatcttcttatatctatctccatcatgttgatacaataatgcttcaacattcatagatgcagctttaggttgacgcgttgcaagattggttttacgcgttaacaaatccgttctacctactaattcatccactgttctcaatcctagttccgcaagaatctctctcaattcttcagcaacaaaatgcataaaattcacaacgtgatccgctctaccattaaatagtgcgcgtaggtctttattttgtgttgcaataccaaccggacatgtatctttatgacaaacacgcatcatgatgcatcctaaaacaaccaatggtgcagtcgcaaagccaaattcttcagcgcctaacgcacaagcgtaggctacgtctttgccagtgagtaacttaccatctgtttctaccttcacacgtgatctcaagtcattcatcatcaatgtttgatgcgtttcagctaatccaatctcccatggcacgcctgcatgttgaatactcgtcttcggtgatgcccctgtaccaccatcgtaaccactaataacaattttatcggcataggcttttgctacgcccgctgcaatggtaccaacacctgttttagatacgagcttaactgttatattggcatctttattggcattttttaaatcgtgtattaactgtgctaagtcttctatcgaataaatatcatgatgcggcggtggtgatatcaagccaatacctggtgttgagccccttacttcagctatccatggatatactttggttcctggtaattgtccgccttcccctggtttagcgccttgcgcaactttaatttgtatttcttttgcgtgttgcaagtagtcacttgtcacaccaaaacgaccggatgccacttgtttaatcgcacttgaacgattacgtccttcttcatcaactataaagcgctctggattttctccgccttcaccgctattacttttaccacccatttgattcattgcttctgctaatgtttggtgggcttcttcagaaatagaaccatagctcattgcacctgtattaaaacgttgaacaattgcacttgcaggttctacttcactgatatcgattggtgtttgcgatgatttaaatgtcatcaagtgacgaatatgatccgtacgcttatgattaacttcgtttgaaaatgctttgaatttttcataatcattcaatcgacacgcatgttgcaataaatgaatagatgtagggttaaaagcatggcgttgaccttgcttacgccattggaatgtactccccgattcaatgtactcactttttggtgtctgtctagatttattctctttatcaatcatctcaagtgatatgccagataattttgtttgcgttccagtgaaatatctttcaacaacctcatctgataatccaactgcttcaaagatttgtgccccttgataactttgaactgttgaaatacccattttagccattactttaattacaccttcagacaatgtatctgtataagtttgaacattttcagaaatatccccttctaaacgttcattttgcactaattcttcaattgttcgttgcgctaaatatggcacaaccgcattagcaccataacctagcaaacaagcaatgtgatgaacctctcttgcttcgcccgacaaagcaacaatacttgttcgcatacgcaatccttctttgatcaacaattggtgaacatggctcacagctaataatatcggcatcgcgtaacctttttctgaaactaaaacactatcatcgagaactaaaatttcttctccacgttttactgcttgaatagctttattaccaagtacatctagcgcgtcttctaaatcatcatgatataccgttgataaacgcgcgacattaaatcggctttcttcaatgacatttaactgcgcttccgtcatgacagggcgttttaattgaatacgatttaacgcatcttcactcggttgtaacaaattcccctcgctacctaaataagacaactcactcgttacaatcttttcacgataagcatcaataggaggattagtaacttgtgcaaataattgtttgaaataattaaagagtgattcatcctgttcatttaatgctgctatcggcacatcataacccatcgcaccaataggatctttcttactttcaaccaattctgtaagatatttatctatttcttctttggtatagacaaattgtttttgcatacgtgttaatgttgcttcattccaagaagatggttgataagacacatgctctaaattcaaatcaactttaaattgactcaaccaactctcatatggatgttcatctgcaatacgtgcttttaattcattattttcaaccactttatgtgcattaaaatcaactaatagtaattttcctgggtttaattggcctttaaatgcaacattgtcttctggtacatctactacacctacttctgatgaaaagacaatataattatctttagtaatggtatagcgacctggtctcaaaccatttctatctgttagcgcaccaatcttatcgccgttacagaatgaaatcatcgtcggtccatcccatggttccatcaaataactatagaattcataaaacgcacgtacattagcgttgtttgctttattgtataaccaaggttctggaatcatcagcattgccgctcgctctggttccatagctaaagataaaaattctaatgcattatcaacaattgcagaatcactaccatcttcatctacaatatctttgactttatccttatcttcaccaaaaatggtagctataagctcattctgtcttgcacgcatccagtttacattacctttaattgtattaatttcaccgttatgcattaacaatcgattaggatgtgcacgtttccaactcgggaaagtatttgtactaaaacgagaatgaaccagacctagttttgacacgaaatcttcatgattcaaatcttcatataatgcgttaatttgatctgaacgcaaccaacctttatatacaattgttctatgcgataaactcgtgaaatacaaatccaattgttgttgatttgcgtaattttcaatttgttttctcgctaaaaataatgtgcgctctatatgtgaagtatcatttaacgcaacaaatacttgctgaatatacggcattgtttctgctacatgtgctgcaatcgcgttaatatctacaggcacttctctatagccaagcacagttagaccttccgcttcaaaatgcgcgttaaactgcgcttcatgttgagaacctttaattttttcgtttgtaaaaaacatacctactgcatattgaccttcttcaggtatatcaaaatcaaggtgtcgtgaaaaatatgcatatggtacttcggtcatgatgcctgcaccatcacctgtgacaccatcagcacctataccaccacgatgatctaatctacgtaacatttctaatgatttttccacgatatcatgacttcttttattatccatattggcgtaaaatcctataccacaagcgtcatgttcctcgcgactatcatataaccccaatttctctttatactcgaccatgatcttcacctcttttacgaaaattctgaaaattaaataagtaagtaaactatatagcagttgattaatctgttcaatatataaaatagatgatatcattctaattattagaacgattgttgaaaagagggttatacatggaaattaaacaattgaaatattttatagaagttgcaaaaagagaacatttatcagaagcagcattagaattaaatattgcacaatcagcaatcagtcgccaaattgctcatcttgaaaatgaactccaagttaccctattcaaaagagaaggtcgaaatatttatttaacagatgaaggaaaacagtttttctctgaagcaaccaaaattatcgaccaacttgatgaaacaatccgtctgttccacaatcaatcagagtcaaatcacttcattataagaatcggctatgttgaatgttatatttctcaagtactcactttattgatacaagcatttgaaaacaacagtgattctattattgaacctattctaatgaaagaaagcgaaatattgaacgctctgattacaaaccaaatcgatattgcctttatggatttaacacaaaaaatcaaacaaaatacatcattaaaaataaatccgttatttgaagaaaattttcatatctacgtccctaaagatgatccaattactatggcaacgaatccacctttaatacaattttcaaacaaatcgatttatgaactctatgctttgccaccgcacatcaaacaaacattagctaatgtcgtagaaacgcctattcgcactgtaactagtacacagttagctcaatacttattaaataaaggtcgaggctatatcatcgcaccatcctatcaactcttagataaaaatccccaaaaatggatagatatctcattagaacacacagagttaaaacggaccatatgtagcatcattcgtcgtgataatagaaaaaatgatattcaactcatgttatctacgattgaccagttattaagtcgtagcgccacatatcattaaatacttttcataaatctttgaattcagttctcgatgcgcgtataatcgcattgtctataaagagaggactgaatttatttgaagtctgttaaaacattattaacacgccccttcaattgggttgtacttaccttttgcattatttttgttggattattcatattcactttttttaatgctaagttttatgacacaccgattgggcaaattacacaaataaacaatactcaatcaacacaagtgtcagatgaacatcacaacaaagatactaagcataaagaaacattacatattcatattttaaatggtaaattcgaaggtaaaacaactacaatcacacatgaatataccgagtcacaagcagacagtgaagcattttcaaaaaatgataaagtcttattgcacgttgacaaaaatctcagcaccgcctatataacggaaaagaaacgcgatagtttagtcgttgcgataactggtatatttttattaaccgtgttactagtaggtaaaaaaataggtttacaatcgattctatctcttgcgctcaatacatgtattgtattattagcgatttatattcataatcaatcgccaaatatcagtctgttcggcctaatgagcatcgccatcttcatttctacgacattaacgctagtcctcgtcacaggctggcaatggcggacactcatcaccattatcagcactttacttggcacattcttatgcgtaggtattacgcaatgcatcattcaaataactgatggctctggtttaaaattcgaaactatgagttttctaaccttgccaccaaaggaagtattcttagcttctgtcatgattggttcactaggcgctgtcatggatgttgctattacaattgccagtggtatggctgaaattctacgtcgtacacctgatatcagtatgagacgttgggcacttgcaggatgtaacatcggacaagacattatgggaacaatgacaaatatattactattttcatatttatccggaagtttgcctatgctcctaatttacttaaaaaatgcaaacaccattacgtatacaatttctatgaattggtcattggaaatttcccgggcaatcacgggtggtattggcattgtcttaacaattcccatcaccattctattgatgcaagtttggtttaaattgcgaggtgttaaatcatgagtgcgataacattattaggtctcatattatttatattaatgttgatctttggtgggaaaaagggattgatttcttatctgacactgtttttaaattttgtcattttatttatttcaattatactcatcatattcggtgtgcctatttatctagttacacttatattctgcattgttattgcagcctgtaatttgtttgtactaaatagctataatacaaaaacaaaagctgcattttacgctacaatcgttacgacagtcatattaatcgcagctatatatttatccgtttcaatcggacatttacaagggtttacaaccgaacaacaggacgaaacttatatcttttctatgaatatcggtatagatatggtgaaatttatggtatttaccatcgtacttgccgtgatcgccgctgttattgatttagctattacaatcagttctccaatgtatgaattaagcgaaacaaatcctaatttaacacaaaaagaattatttcattcaggtatgcgggtcggtcgtgaaatattagcaacatcagccaatacgatatatctcgcttatttcggtggtcaattgacattgtttttctggtttttcaagcttaactattcctttgggcacattataaattctaaaattttcgcacaagaattcatttctattattcttggcggtatcgcagttgctataagcatcccaattactgcatggttaacagcattattaatcaaaaatcaaaaagcaccagacacccatcgttaattttaaggacagcgtatccacagttcttctttgtattgtttcaaagcatcatcctacctcatattatgttgcgctgtggatgtaatcatagatgtcataaattgtatgttcagtgctgccatctcataactaactaaaaaccagtctgaaacatcaacgattgtttcagactggttttttatatttatttacgtctatttaatttatttaattcgccactaaaataagcgcgctccccatgtacaacataatccaagccttgtgcctcttcttctgtatctgtccctagttcactaaattgggcaatcactttcgcaataataaaagtcatgatcccactaaatacaatggtaatagctacagctatcaactgattgattacgggcatcatacctccgcctaataaaagcccatttaccacatcgccattaatatgatgtgactgaaatacaccagttaaaagtgcaccgaccaccccccctacaccgtgtatgccaaatgcatctaaggcatcattataatgtaatttccctttaatgtaattaatgacgaagtaacaacacacaccgcctataagcgcaatcaccacagcactcatatatcctacgaaaccggcagctggtgtaatagcaactaatcctgcaagcatgcccgacaacatacctatcaaactcgtcgttttcttcatgcaatactctatcattgaccaacctaaggcacctgcactcgctgcgagcaccgtattcacaaatgaaatcatcgctattttattaaacgacaatgcgctccctacattaaatccataccacccaatccaaacgaaaattgcgccaataagtgtaataataaggttatgtggcggtcttttatcaaagtttttccctgcaccaatcataattgctaagaccaaaccagatataccagacgttatatgcacaactgttccacctgcataatcaatcgcacctaattgatcaatccaacctccaccccatacccaatgtgcaacaggactgtatacacagataacccataaaaacacaaaaattaaataaggtataaacttcattttttcagctattgatcctgataaaattgaaactgcaatggtacagaacatcaactgaaatagcataaacagcgctaaaggtatatgcggtgaaattgctgattgtgtactaaaaccaacatgagctaaacctatatatgtaaaatctccaaaaaatgaattcccagatccaaaactaaagctaaatccaaataacatccatgcaaacgttactataacaattgccgacatactttgcatgactgtattcaatacgtttttagattgaaccaatcccccataaaacaaacttaaccccggtgtcattaaccacactagtaacgtacaaagaaacaaaaataatgtatcattcatattcatagcactcactcctttataccggagcataaacccattccatatgaatagcaaaaatgcgtcaggaaaaataacactttatgttaccttttctaacgcattccatatcataactatttaattgtccgccttaaaatataaacagatcgaccttctaaagtagatgttcccgcattttcataattggcctgtttatacaatgcttgtgctacgatattgtcattattaacagtgagataaatttcatctatatctggaaattgtttactcaagtagcctggcagtgcatccattacttttttagcgtaacctttcccacgttggtttttatcaatgctaaatgacctaaaaaatattgcgactttatttgtagtatatggtgccacgccttgcccctcatgtaaagtaaaaaagccaacacattggtgcttatgattataaattagcgtaggatgcctttcactatcatgcgctgcgagtttgatattttcaacaggtgtcttagtgaattgacgatcggaaatatctaacgctatatgcttcacatcacttattaatttctcagtatagggaacaagctcaacgaaagatatctctcgttctatatttttaaaatgttgctgttcttctatccatgtaataacggcaggcgcaattttatgttcatcctttttatctatccattgtaaatcagtgatttcttgacttggtaccaaggtagaccaatctatatctgccgtcgtataaaaacaattgagttctgttttcatatttttttgtgggtaggcttcgccaacaacggtatgcatataaattaaagatgactcaggtatatctaattgtagttcttcatttaattctctttgtaacgcttgtttatacgtctctcctatatcaatcttgccgcctggaaaataatacttttctctattccttgactgaacaagcaataatttctcttgttcttcaattactaaacacacacatttaatcattactcaacaccccacagcatcaatttccgttccatactaactttatattaatgaatcaaactggttttatactatcaacgcttatgttatcatattttattatccatacacattaaatttcagacaatcttaattgaatgtatattaatggtataatacgaaacaagataactattttcaaaaatggaggctttacgataaatggctaaaaaaactaaaataaatcgcatttctaacacacttaattttgtaggcattgctgtagaaggttttaattggtatgcctatcaatcaagaaataaaaaattaatttacgcaagcattgccatcactagtgttggcgctgtgttagatttttatacagctttaaaatcaccacgtaaattcgcaaaagtattttcaactttcacacttgcgagcacactattttcaacagtaaaacgcttaaaaactgttcgtaaaggtgaagtaagtatctagtcaccaacaaaccaacccaagttctatttaaaaaaactcgaatcacaatatggacatccatactatgcttcgagtcttttttttaatttattattaatgaatatatacataagaacttacttgtgaagcaggaattgttctataagtcacaatacctggtgatgcactatagttcatttcagaaatcgttatactaccgttagcatttacagattctacaaacgctacatgaccataatagcccatatcagattgtaagatagaaccaacagtcgctttgcggtctattgtataaccatccgctgcagcagctgtatcccagttattggcattccaccaatatgtactaattcctttaccaatttgggcacgtttattgaatacatgccacgtacattgaccccagtcatataaatttgaatgattaaagacaggtgtcttatacccagcagatccagtagaacttgatcctgaaccacctgtagatgctttacctgatacttttaatttttgacctggataaatattaaagttagttaaaccatttaaactcatgattttttgatacgttgtgccatattttgcagcaatcgctgataatgagtcacccgatttaactgtataggttgttgtgctgccactacttgtgttccctgaagtacttgagctacttgaagacgctgcacctgatacttttaatttttgtcccggataaatattaaaatttgataaaccatttaggctcataattttttgatacgttgtgccatattttgcagcaatccctgataaagtgtcacccgatttaaccgtgtatgttgatcccgtagatgtatttgacgatgtactagaacttgttgaaccagatactttcaacgattgattcggaaaaataacgtttgacgttaaattattaagcgactttaacttagccactgacatattatatttattcgctattgaccataatgaatcgccgctcttaactttataagttgttgcagcatctgcgtttgtccaagtaactgcagctaatgcgcttgtcccgattacagttgcaataatttttttacgcaatttatgtaaacctcccaaatattctcttttttcgcttcatctctatactcacctgtttattatacaccctcgacctgtaaatgagtatattaattatatgacattatcattacaaaagagaacaactcggttgcgttcaaattaaaccgcaaacaacaaagatttattcaaaaggtcgtaattttatattttctataccaaaatatgcttttaatagtgtctgataattactttgtgttacaggaattttttctttttcaccatgatccgtaatcgttaaatgattattagataatgttacgcgtccatacaactttgctttactaacaattaatttttttacaaatatagaatgcgcatcatactgattaaaatgaatcgcttcatcgaaatccatgattgcttgcgctttgtcaatcgcgcgatattgaatttcccaagcctcatctttatatttgctcatatcaatcgtttgcgtatcaatccacgacgcttgaaaatatccattcacatcctcaatcacttccggttcattttttaatggcatcgcttgtttaggtacatcggcataacccacatctactaaatatttttcttgatttatttgtacaattaatgccatatgagaaccggccatggcccacccattacccgtattgattgttgctgatatcatataagcatcaaaccctttggacgttatccaactatggaacaaacgattctgttcgtaacaataaccacctctgtgctctgaaacaattttataaatcatcgcctcatcgtctaaagcaatcggttgtttattttgcacattgatattttcaaaaggtacattaataacatattgatatatataatgatgtagtgttgttaaatcattgtcacgataattttctgtattaatatttaagtaatcttctaatggtttaaaatcggtcattgtcttcaccctttttaaatttaaaatactccctaatacaattcattttaataaattttgctagactaatacaatttatctacattacacatttatcgatttttttcaattttgttatttgcaaataacaaaaacgggtaagacaatacatatatgtattgatagatttgacactagactaataaatagatacggtgtatattcgatgtttttaaagttgttatagcttaacaattcaatttttctgatttttcaaacttttaaattcatatttcaatatctatcaaactattttaatgggggtaattatttgactaaagaacacagcgaacaacaaaaagatttacgtattcgcagcaaagtaattagtgaaggtgtcagtcgtacacccaatcgagcttatttacgggcactcggctttgaagatgaagattttcaaaaaccaatgattggtgttgcaagtacttggagtgaagtcacgccatgtaatatgcatattgatggtttagctcgtgcttcaaaacaaggcattagtgaggcaggtgcttcgccacttattttcaataccattacagtatcagatggtatttcaatgggaacagacggtatgcgcttctctttaccaagtcgtgaaattatcgcggattctatagaatcagttgtcagtgctgaaaatttagatgcacttgtcgctattggtggttgtgacaaaaacatgccgggatgtatgattggtatcgctcgtcttaatttaccagctgtctttgtttatggcggcacaatattgcctgggaaattggatggtaaagatttagatgctgtttctgcctttgaaggcgtcggacagtataataatggcgaaatagataaagaggcacttcacaaagtagaatgtgccgcttgtccaggggccggtgcttgtggtggtatgttcactgccaatacgatgtcatctgctattgaggccatgggcatgagtttaccaggaagtgcttcgcatccagcagtttctacaaataaatccaaagacagcagagcagcaggtaaagccgtttataaactattagaaaaaggcatctatccaaaagatattatgactaaagaagcatttgaaaatgcaattactgtagtcatggcacttggaggatctaccaatgcaattttacatttacttgctattgcacatacaatcgaagtcgatttaacacttgatgatttcgaaaaaattcgtaagcgtgtcccacatatcgctgacttgagaccaagtggtaaatatgtcatggcacatcttgatgaagtcggtggtattccagcagttatgaaattattacatgacaaaggcttaatccatggagattgcttgaccgtaactggcaagactgttgctgaaaaccttgaacaacaacctgacctaaccgataataaatctatcattgattttgacaatccaaaacatgctactggaccgcttgttatcttgaaaggaaatcttgccccagaaggcgccgttgcaaaaatctcaggtctgagcgtaacttatatcaaaggacccgcacgcgtatttgattccgaatctaaggctaccaaagccatcttaaatgacgaaatcaaaccaggtgacgtggtcgttattcgatatgctggccctaaaggtgcacctggcatgcctgaaatgctatctgcatcatccattcttgttggtaagggattaggtgaatctgtagcgttactcacagatggccgtttctctggcggttctcatggtcttgttatcggacacgcagcgccagaatcacaagttggcggtccgatggcattattagaagaaaacgacacgattaccattgacgcagaaaaacttgaaattagttttgatgtatcagacgaagaacttgagcgtcgtaacaaacaatggcaagcaccacctttaaaagccaatcgaggtacgctagctaagtatgctaagcttgtgtcatccgcttcaaaaggagctatcacagactaaattttctttataggcaagtagcagcgtaatgtcgcttgttattaatagttatttctagcactagaatcacatttgaaacatgactaaacgattttaatatcatgttctagttatactagcaatctatttcatgaacttgtgttttacatttaaaaaaacagctaactgctgtgtatatgaatgaatagaccgaaacttctaatgaagtttcggtctattcattttgctcaaaaataaaacaattccattcaagacactttagcatgcgcaattgtttttatttttcctcgctataccatttgtgaatgcttttttactacttaggtattactcaacacaattgagcgcaattatattaaagtaagggtaacaaaacaaagcgaggtgagttacatgagctttatcattgatatcatcaaaaaaatcgttggtttattcacaggtaaataatttttaaaaattatttgatgggtttgggacataaatagttgtctcaagccccttttttattagagcataggtgcaagcgctgactcctttttaaccttttccatgttaatcatttacgtttgcccattcttcacgcagtatgcccattttaatcgcatcatataattggccttctacaattcttgcttggcgaatacaagcttcttctttcatacctaccctcattgcaagttttatcatccgtttattaccagaccaagtggaaataccaagtcgatgtacaaagttctgttcaaataaataatctacccacaatttaaatacttcagaaccaataccactttcccaaaactttgtatcatagatgacaatacctatttctaaccaatttgtatttttatccacccagtacgatccaactgtacctttaaattgaccatcagccataatagctaacgtactttctacacttggataaatgtaacgcccttgtttcgttcgctcaaaaaatgtagatttatctattttgggttcattaatatacggtccattccattttttagctgcttgtagcttttcttcatacttccaataataaatttcatcaattatagcatcgtttatgactgctaattcaccttttgaaaatggaatcattgaaacgcctcccaactattagtacatattatacgcatgatcatttaataaatatactttcacccataaaaaagctcttcctaaaaagtttacgcatattgcgtgcctactttaagaaagagcttgtgatatatagcttaaatacgattttacttaataagctttacgtgaatagctaacttacgtttagatgttcaaatcatcttagcgaactgatatcatattttactattttattaaaagaataaagattttattactctgaagaaagaacctaataaatcgaataagtcacctgacatcatcataacctccttcgcaaaatttatcgcacaaattatgcatcaaattgttcgttacgtactaaatcatcggctaaaccatgccaaaactgttgtagttcttctgttggatggctataatccgttgcatcttggccaacgaaatctacatgatcccaaccatgtttgataggtgttacttgccatatacctttttgaatttgatctgttgcttctgtatatgcctgattaaatggatgttgtgctgaaattgtagaaatcagaccatcattttcacgccattctttttctgctgctttcccaatcacattacctgtaacagtgaacgggaagaacatgccgatatcagatttttgcttacctaataatgtcggtcttgtagattcaccagtataggttttatatacaatattaggatttagggacgtttttttatttaacttttctgcgccttcacgtgttaaatcatagaaaccattatcttgcgttgtccaaagtgcactattttgtacacgttgtacatatttaacatatgattcgccttctctttgtttaagtccccattgtccaaatccaaaatctactttagagtttttattacctttgaatttcgcataatcaagggccaactgtcttacaaaggcttcattacccaatttatctgcggcaattgtaccattatgtggcgtacctaaagtcgtaatagaattaatcatattgtcattcgtaccttgatataatggtgaaatttcaccaccatgcgctttttgatattctatttcttctttgttgccgttacgcaacagttcttctaattgtcttaccgtttgtccacccatactatgcgctactagatgtactttttgtcctggctgtcaatctttatacacaccttcatatgtttttccgtaacggtcatgtccatatttttcagcatgtgctgcaccatagtccacagtaccaccttttatgtattaataaagttcaacagcacggtcatagttactgcttaatgcacctatacttgcttcatatgtttcatatccattactttctaagtcttggcgaatatctaatttgtcgccaccccagtaatgcgataaaacagatggattaatatcatctgtgaaaccattaaagccatgaaccaaaatgattgggtcttgttttttatactgtccttgtttagcagttttatttggttcttcagctgttttgttaacagcttgctgagtttgatttttcggtgtggctactgcgctttcttttaatgcttttagtgatttatcttgattatctttacgttcgtcatctgaattggtagttgccactttttcaccatttaatttatcgaacgacagtcctgacttatctgtagtgacagccgcttctttgttaggagatgggcgctcagttgataacgtatccgtattttccgtcagcttatttttgtctgcttggttatattccgggtctactgtatttttattatcaattgtttttgtttgatcggattgttgttcagtatgtaagcttgcattattcgtatttttttcatcattcgcttgtgtatgatcattttcaaccggtattgctgatgtttcattcactaatttttcttgtttatcattccccaattgattcccattcaattgttgtacctttgtttcagtatgatggtcttcttcagcagcctgagctgtccctacacctaaaaatagtaatgaacctattaaaattgaagaagcgccgaaagtaaatttacgtatactgtacttgttttgtcttttatccatattcaacacctcttggttaatgattttatacacattcaaataaaactatatgaaaagattaacgataaaacgtggtatcagttcaaaaaacttaccaattaaagctttcatacgactcaactcctttaaaagaaaacgcttacataatttccgaaaatttttatttatcaaaagaataatttaagacattaagtccatacatcgtatctaaaaaattaaaacttttaataaataatttaattagattttactaaataactgctatcaagctaacgatagagtgcaatttaattttgcgcaatcaaaaaagcactcgccaaataacgacgagtacattttagataaattgagcaataaatattagtacgatgatgaccggtaaaataaatttcactagataataccacggcataaataatttaaatttatcttttccaaaatgggcttttaaatcatctttgtttagcaattgtcctaccactaacgttgtccctaatgcacctaaaggcattaatatgttaataactaaaaaatccatattatcaaatattgaacctgcgccaaattgaataccacttaaactactaaatgacaatgtagcaggtatactaatcataaacactaataaactagcataaaaagcaacaggtttacgttttgaattatcatttttagtaaagtttgagacgtttaattcaagtaatgatatagaagaagtcagtgctgcaaacaagaataaaattagaaaaattaaatagaatccttgtccaaaagccatctgatcaaatactttgggtaatactttgaataataagccaggaccttcagttggactgtaaccaaatgcagcgattgctgggaatatcgccattcctgctaataccgacaccaaaatgttcatagcaacaattgaaactgcagaagtcttaatagtcatttctttcgaagcataactggcataagtaatcatgcccgttgttcctaaagataaagtgaagaatgattgtccaagtgcaaataagacaccttccatggatatatcttctaaacgtggttctaagataaacttcaagccttccattgaaccctctaaagaaaatgatttaatcacaatcacaattaaaaagataaacagtaatggcatcataaatttagatgctttctctaagcctttttcgacacccatcataacaataatcattgttaataaaatgaagataccttgacctgtaatggttaaccaaggatttcctataatcgtctcaaatgctatacttcctaattgatcattactaaaagttaatatttgaaacgctacattgatgatatatataacgatccagccaccaatgacactataaaaaccaaataatataaatactgctaaattaccgttccagccaatgacattaagccaacgctttttcgttaatttttcatatattttagttgtgtaggttctccccattttacctacagtaaattccattataagtagtggcaatcctacaaatatcgtaaatactagaaacattagtaaaaacgcaccaccaccatatatgccagccatatatgggaatttccacatagctcctagtccgatagcagagccagcacttgctaaaataaatcctgtcgaggatttccattgtgattgtttattcattatttttacatcctttatattttacaaagctttattgcgttaaagcgttcgcgtgacatagcatctactataacatttttttatgactgactcaatatatttttacacatgatttccttattaaaactatgacaccagtcatagcaagctataataacatatgaatgtttcatgaactttcatatgaaaaatactttaaatattataaattatctgacatttcattgaatatatattcaatttatgataaagtagcatgtgttttgtataagacaatctccttgaaatcgaggtattaagaatgaataaactcatactaatttctggtcttatgttattttcatttttcttcggggccggaaatttaatatttccacctatgttaggttatacagctcaagaaaatatgtgggtttctatgactggattcgctattacaggtattttacttccttacataactgtaatcgttgtggcatatatgaacggtggcgttgaaagtattgggaataaagtacacccaatctttggtactgtttttgctatctgtatttatttatctattggagcactttatggtattccaagggcggctaacgttgcctatgaaatcggaaccaaccatgttttaccggtacataatcatttcactttaattatattctcgcttatctttttcctagttgtttatctaattgcgctttatccaaatcgtattattgataaccttggaaaatatttaacgccgatattaattattattattgcagtcttatgtatattagtaatcattaatcctgaaggttcaatcggacaagcgagtggcgaatatgctcaaacacctatcgtgtcaggtattttagaaggttacttcaccatggatttagtagcggcattagccttttccgtagtcatcgttcaaatgtttaaaatgagcggtgtaaacgatcataagacgcttgtaaaaaatgtaattaaatccggactgatttcagccatattattattaattatctattttgcactggcgtatgtgggtgcgactacaagtcatgaaggctttaaagatggaactggtatattaacattcaattcgttacgcgtatttggttcaatcggaaacttattgtttggcgttatcgttatcttggcatgtttaacaacatgtattggtttagttaatgcttgcgcagcttttgctatgaagaaattaccaaaaatatcctacaagatgtttgttttaatcttttctttattaggctttttagtttcaacattaggcttagaattgattttacaaatcgctgtgccactcttaacatttatttatccaacatcgattgtattagtccttatatcattggtaagtattttcatcccatttgagatgaaatatgcatttatattaccaacacttatgacactattcatttcgttgttacaaatatttaatgattttaacctgttccaaccattaatttcattatataaagtgctaccattatcagatatacaattaagctggttacttccattcattattttattatttattggattaatcattgattatttcttaaaaaataaaaccgtcagtacatcttaaatagtctgacatgccatacttaaatatatgatttgaaattcattgagtattcgttacctagattaaatgaggtagacgaatactcttttttagctacaagaagatatatattatcgtcatttgttataatcagtataaacaaatatatgcaattgtcatttgattaataaaacatatagaatggagcattatcatggatacattcaatacatttttagaaacaattgataacgacaaacacaaagcaacattgtctgaagttttgaactggattgcagatacgtttcctaacttaaaaacaacaataaaatggaatcaacctatgtttacggatcacggcacatttatcattggatttagcgttgcgaaacaacatttttcaatcgctcccgaagctaaagctttaaaggaatatacacaacaaattgaggcagttggttactcgcagaccagcaacctttttcgaataaaatggagtcaagacgtaaattacacgttattaaaagctataattcaatacaatatagatgataaatcccattgtgatacattctggagaccataacttgaaaaatatatctttcttttttgtgctgattcactaaagacgaaaaccacatacaaaaccccctcacctagttttccagtgagggggttctgttcatgattctatttattcagtaaaatcacttaatatgagttatttaaatatttcactatcattttaataataaattggaaatattttttaaatggctaaagcaaatgtttataggttctatttttatataaaagccataattccagatattaaaaataaaatagcgcagattagatacaagtatcctagttttttcgattgtttcttaactatgacataataaagtactatcatggatagtgctaaaacaagtgacgagacgcctctatgaacagatatgatattaaacatgaacaccccgttcacgataaaaagtattaccgatatcacaagtgcaattttatcgaacttatcaagtcttctctctccttgtttcattgacacataccacccttttgaatattttatctaataatcttcaaaaaatgcgatgatgtcttgttctacttcgagatgaccctcaccataagtcatcaaatgtttagacgggccatagcctttcatttctttgtcttcatgttggatgcgatcataaatataatgtgcactcgtttcataagcatcatcatcttgctcgccatatttaattgcaatcggtgcagtaatatcttttaaatgcgccatgacattttctaccaataattgaaacttatatagctgaggactataattttcaatttcagccaactgttggtcaatatctgcttgttcaagaccaactaaactccccatacgctgtccataaacttcaagtctacccgaaagacccgcatcaccttttctataaggtgtagacataatcgctattgaacttatctctttgctttctgccaatttcaatgacaagataccacctagcgaaataccgcacacactaatttctgaatatcctttatcttttaaaaattggtaaccggccgttgcatctgctaaccaatcatcaacatcaaatgccattaattcatcaagcattaaaccatgtcctttgtatgctggtacataacaggtaaatcccgcttcatgtaattttattgctaatagttttacatctcgtacggttcctgtaaaagaatgaagcaataatatcgccttttcagacgcttcatgttccaaaaatattggattcggtgccttcacatttatcattatttgtcactccaaattttagtttctttatgtattgtaattgaaaagaacttgtccaacaaaatctttcattttaatcatacaattaaaaaacttcctttcaaaatgatagacacaacatatcactttaaaaggaagtactacaaattcaatttcctatgcttaattcttactgaaaaactgtaattcataaatagattcatcattataaacattaaagctatcaataataccatttaaatacagtacttgtgtttttcgacttacattatgttgatatgatatttttacatttaaatctgattcatagccattatttttgattgtcttttcaatttcactaaaaacatcacgattaattagcaataaataaccttcattactaggttgtatattcacatatttcttttgtaatacatcttgttcgccaatataaatttcaatttttatatttttagctgctccgccacctaggttatataatttcaactaaaacatctatacattctcctcttaaattatataggagcaatatatgtcttttcaaaataataaattacgcttattcatcaaaatttacaatttccgtctctctgttataactatcttgttaatgttgcttttaattattttctctctagatttaagagctgaagatacttatcagtctatgactgacttaatggataatacaaacgaaggtacagattgggaactcagttataacgataataatagtgacacacttatcggtgctattcacggtggtaacattgaagctggaacttctgaagccgcaaaattaactgcgaataaaggcgcatatcgctactatgcgtttgaaggcattcgaccatgagacaattctgatctccatgtaacttccacaaattttgatgaacctatcattgaatcaatgcaacaaaaggtttccagttctgtaatgattcacggggcagatggtaatgatgccacaatatacattgggggcaaagatgaaacacttaaagattcaattgaaaatgaactaactgaaaatggctttaatgtagaggtatctcctagtcatctagaaggtgaatccagccaaaacattgctaataagaacgctgaaaatgcaggtgtacagttagaattgactacaggtttacgtcaatctttctttaataaccaagatttatcatttaattcgcgttctgatcaaagtaattggagtatgaccctatatgattttgctcatgcccttaaggacacgattgaagcaaaataaatatgaatcaatcacagtcactgttcatatcatcactgtgttcgattcatatctttttaaaagtattaagtttcttcttccaccactctatttttagcggctgcgaacccaaaaatgaaaactaaaatagacatcataataaatgcaataatgacaatgtcccagctgtttgtaaggtcatgaagcaatccaatcaaaaatggaccaaatgcagctatgaaataaccaacagactgtccaaagccagacaacgaaatactaccattgctagtacgagcacgtattgaaaagaaagtcatacataagctaaaacatgcccccattgctaaacctacaataaccatacccataataagtattggtaaggattgtgcaaaaaataatccaaatcctattaaaaagagcaatgtgacaataatcactaaaatacgttgattttttaatttcgcagctattactggaaatataaatgtcattggtacttgcgcaaattgattcaacatcaataaataacctgcagtattaggatctatacctctgtccatcaaaatagagggcacccatgcgaccatcgtataaaaaatcattgactgaaatcccatcgttaatgcaaccatccatgcgattttggattttatcatatttaattttttatttttgtttaattcagcattttcaatcgttcttgcttcgagattcgatccactgcgcacggttaatagccaaagcgttattgcagccagccctaatatgacccaaaacactaacgacaatctgaatcctaatagcgtcatttcagataaaggatgactcaaccctccgcccaatcctgcagtaaaattcattgtcccactataaatgccagtcataagtcctatctgcattgggaagtaccactttacataactcggtaggacaacatttccaaatgcaatggcaacccctaataaaatagtaccgataataaacacattaaagtcacccataatacgtaatattaaagctacaattaacaataacgtcgagtaaagtaatgtataggacatggtcaaacgtgttgtaactttagatactaagggtgaaacgattgcaaatataatgagtggaatcgttgttagaaaacctgcgatactatcgttgattgacatcgcttctttaatttcatgaatcacaggtcctacagaagttaatggcgctcttaaagttgatgcaataagaatgattgctataacaacaatccaatttttttgaactttatggttctgagttaattcagccattctccaccaactttctcattttcatttaataaactgatacttatatactgatgtaagtatacaacaaatttttgacgtcgttaatcgcatacgacttaataaaatgacgattattctattctctgaacagatttctaaccactcacattagtccagataacacttaagagggttcatgtgctttatacacacacttactactattaatttgaatcacagacacttttatttaagataccattcaagtgcttggctttccagccgttttacaaatgcatcttttccgtcacaatatccttctatatcatatggaaactggtgtgctaacgctacttttaattctccatatgcatgtgcaactgccacatttgttcttaaatagtctctaactgccaaatgacgattaatttcataatgattttcttgttgaaatgcatgcacatgatgtgttcgaggattttctccttttttaaaaaagcgtctccctgttatcccattttctcctaatgccttataacctatatttgccattgcttcattaaaatgatctattttatttatatcttgtacaacaggcaatatatctataataggctttgcctttaagccaggaactgacgtactaccaatatgatgtatttcaataacttcatcacccaatattgaaaggattttttgcttttcattttcaaattgcattatccattgcttttgatgtgattgaacatctattttcataattgcacacttcctcacctatttttttatagtatacatgaacaatcattgtcctatcatgcttcgattacctatccgttatattttatatgctattaaatatattccgaacaacttgataccatccttattttttaaagaataattgcaaaaaatattagatttttaaccttaatggtttgctttgctaacttaaaaggcataaaatttatcgttgggatgttataaaaggagaggtaatcgtaatgtcggaaattacaatatcaaataagaaacgaaatactattattttagttatgctcagcagtgcttttgtcgcgatgctcaaccaaacattgctcaacactgcacttcctgccattatttcaggtcttgaaatcactgaaacaactgctcaatggctcattacaggattcatgcttgttaacggaattatgattcctatgactgcattccttatggatcggtttcatacaagatcactttatattttttcaatgagtgcattcttaatcggttccattatagctgctttttcaccatcatttggtttacttatgtttgctcgagtgattcaagctattggggcaggtattttactaccattaatgcaattcactgtcttcaccctctttccttctgaaaaacgaggatttgccatggggcttacaggaattgttgcgcaatcagcacctgcaattggccctacattaactggatttctcatagacacctttagttggagagctccttttatcgtagttgcagcaattgctatcattgcctttattattggtattatatttgtcgaaagtaataacgaaacaaaacgtacagaactagataaaacgtctgttatgtattccacgtttggttttggactaatgctttacggttttagtagtgccggtaatcttggtttctcttcacccattgttatcatttcattaatacttggtattatcatcgtaggtatctttgtcatgagacaaattagaatcgataacccattattaaatatgcgtgtatttgcaaatagaaccttttcactatctgcattcgcatctatggtactatttatcggtatcgtaggtccggctttattaatacccatgtatattcaaactggtctaggactgtcggctatcttatccggactcgtcatcttgcccggagccattgtcaatgcatttatgtccgtttataccggcaaaatttatgataaatatggtttgaaaatattagccgtacctggattcatcatattaattattatgacaattttacattgtttcttaactacagacacaccttattggtatgttgtcattatttacgctatcagaatgtttgcagtagcactcattattatgccgttaaatacgattggtattaacgcattagaagcaaaaaatatttcccacggcactgccattattaattctttaagaatcattgcaggcgctattggtacagcagttatgattacaatattaacgattgttagatctaattacactgaacatgttagtggttcgcaaagtaaaacagaaatcatgcaacatgctacagtgcttggtatcaatgctgcatttgccttcacggcaattttaatgatcatcggtttcgtcttaaccttaatgattcgcactaaaaaagaaacaatcaatagccgtgaaatttaatataaaaaatcccctcacatcagtaatgtgaggggattcatttgatttggtctatgatgtatttactgacatgttgctttggttttgtctaaaaataattgtgccgcttttgaaaatgtatgatccttacgccatactaaattatgtttcgaaactaattttggtttcaatggaatgaaagtaagttcactttctgtagacgtatcaataatactgtccaatgtaatcgcataacccaatcctgcctttaccatccacccagcattgtaagccaaattaaaagtactaacgatatttaaatcgtcaaattgtgtaccaaaccattctgcaaaatcatttttatccaatgttgtatctaatacttgtcttgaacatattaatggtttatctactagatacttattattaatatatttattttgtgacaatggatcaccttttttaaccacaacaccccaatgatctgaagtaggtaaatacaatgtcttatatttatttaaacttactggttgaatcagaattccaaaatctaataatcccttatcaagcctatttgcgatatcgtccgcattaccactataaatatgaaattgaatattagggtgttcattgtgaatatccttaaaaatatttgcgataacttccataccttttgtttcaccacatcctatatacacattaccttcaatactcctatcaattactttgaattcttcttgtattttattagacatttcaagtaattcttcagctctattttttaatagttgtccttcatccgttagttgaatattatgattacttcttttaaaaagtttcacatttagctctttctctaattcttttatttgtctagataatgttggttgcgtgatatgtaacgcattcgcagcacgcgtaatactttcttccctcgctattctcacaaaatattgaagtgtctttagttccataaggcatctcctttgagttattcaaaataagcataactaaaactttaaaataagtatttgtcatatcttattctaccgcctaaactaaaattattaaagtttgggagggacaaatgatgaaaaataataaattaatcatattcatcttaactattggcgtcttcggtatattaaatactgaaatggggtttattggattaatccctcagattgctgaacattttaatgtaagtacatctactgctggttggttagtttccgtttttgctataggcattgcgatatctggacctattatgcctttattactttcaaaaatagaacgtaaaaaagtaatgattgctgtacttgttatctttattatcagtaacattgtctcattattcacaacaagcttcagcatattactcattgcaagaatcataccggccatatttcatcctgtatacattgcgttagcattttctgttgcttctgattccgttaattcaaaagatgctccaaaagcagtagctagagtatttattggtgtctctgctggcatggtcgtgggtgtgcctatcgttaatttcttggcaaatcaattcaatttatatgctgcgttagcatttttcgcattaattaatatgattgtattgattctcactataatctttatacctaaaatgcccgctaaaaaagcagtaacatatggaacacagttacgtgtacttaaacgccctttaacttggctatccattattgtatctatattgtttaatgctgcagtttttggtgtctatagttatttgaccgattttttaaatattgtaactaacgcgccaagtcatgcagtatctattattctctttttatatggtgcctctaatattttaggcaatgtcattgcaggtaagctattaacaacgattcccaaaaaagcaatttttcttttacctttttcattgataattatttatgtggccatgtttggtattggctcatttttaattccaatgatgatgatttaagtactttggggtatactcgcaggtatttcagcaaatattacacaatatgtcattatctcagttgcgcccgatgcacctgatttatcaaatggtatttttctatctgctgtgaattctggtgcaaccataggtacatttttgggcggcatatttattgcaagtttaggatcgaattttgttatctttattggcatactggcctgtatgataaatattttatttatctacttaagaaacagggagcttaagcagtttgaaataacttcataaaaagcaaaaaccccttcatatgttttcactacatgaaggggttaattattcaatatttgtattttgggcataaaaaaaagacgagttatactcgtcttttagccgttattatagtttaacaacgttagctgcttgaggaccgcggtcgccttcaacgatttcgaattcaacagcttgtccttcttctaatgatttgtagccttcttgagcgattgctgagaagtgtacgaatacgtcgtttccaccttcaacttcgatgaaaccaaaacctttttctgcattaaaccatttaactgtaccgttattcatattaaattcctccatatgtgcttttgcacgaatatttgtaatctgtcttaaaaaatcaaaaggagtaaattcaaaagaataaaactacaaatcaatttcacgaactaaattacttaatacctattatagcgtttacttctgagtttgtacacccctaattgaaaataacttttattatttaatcattctcgtcattatattgtattgaccgacttaattttcacacgattcatgcattgttctcagttaatttaaagatcaagacaatttttatgatttatgagttcacaatataaaaagaaaggcaacttaatctataagtccacactttcttaagtttaatccgtaaccgcctgagcgctatttgttgatttttgtataatcctgaccgtgtaacatccaacgtacattgtacttatccgtaaatgcgcccattttaccaccccagaattgttcttctaaaggcatttcaacatctaccgcttctttaacacgatgatataacgcttcaacttctcttgtgtcatcttcattattaatatcatagtctattaataatgaaataccattgttaattctttctgctctaccaaatgaatcagatgcaagcactgtagtaccagcaatatcaaattgcgcatgcattgtcgcattagctgcttctgcttcactcatattaaaatgagctgcttgatctttaccaactggtaatcttgtaatatttgtagcaccaaatacttcttcataatatgctaatgcttcttttgtattttcaaaattcaaataaggaaaaattgttgtcatcctgacaccccattgtttaatttatacttgctttgcatattattacataagctataaaatagcggtacttttaactccgaattacacaatttattttcgtttaatttgtaatgatacaaccagaacctatatcatcacacttttttcttataaaattcatgatcttgctaacatacttagaataatcttttcctttttgtctctaattttatggcttactttatacaagccttgttctaacttaccgttttctacatatttatttaagttatgcttaagtttttgtttcactaatttgctctccctataattatttcagtccactccattttcattgttgttacattatgtttctcaataccaaatcattttaattatgtgcttaatttaatacttttagttttcttaatttaaaaatatcctcgcacttattacagtacaaggacattcattttaacatttttcaattttaaaacagcatgttatcttatttacaaagtaacataatataacttttaataacatatattatttaagttattaaatgctggaaggtgtgtcgaaaatcaacttcctattaaaaatccttttaggtatacttttcgtcagtatcagttcttggaacaacaccatttctacacgacagaaggttaataaaaaagctgaaaaacatcgcactgaaccaatgacaggggaacagtttcgtttcatgttttttctaaatgtgacgatgtctactggtttttatttacttttggttcataccttttttaattaaaagtataaaattcagtgcttaagtacatacaataactcgaaattatggaataaatacattactttcactatcctcaggataataataaccatttggaattgattgtaactctatcagactatgccatggcgattttaaatatacactactgctaccttcactgtcttcatatctagagttatcatgtttctcagataaagggctcgctcctgcatcaacagcttgttgaattgcacgatccatatcgtcgacaaataacgaaatatgatgatacccattatcttccaaatcaagtggttcccttttatcgtcactttctatctcaaacatctcaatattcggaccattgccaatcacaatcatacgttgtttaacaatagcagaccccttagataggcctaacatgcgctctacttctggaccttttctaggttcatcatcgtaagttaagccatcatatgcatatttcgcatcaaaggcatctttcaaaaatttaaatgctgcttcaatattaggcactgtcatgccaatatggttaatacctcttatattactcattttatcttcctccaatttataaacgttttaattgtataccctatttaaaatgagcttaataattgcagtatatcatccatttttttcagaaaaaagcacaccttatttttatttataaggcgtgcttgtagatttattattttgttaaattgttttcagatactcttcgccttgttttttatcataaacaccttctgttttagcgataaagattgtagctactgagtttcctaatacgtttacacatgttctaagcatttcaagtattctatctacaccgataatcaatgctaaaccttgtggatttaatcctacagatcctaatgtagttagtaatactacgattgaggctcctggtacacccgccatacctttagacgttaacattaatgtaatcattaataagatctgttcaccaatacttaaatcaacaccatataattgagcaacaaatagcgccgcaatagattggtacatggccgcaccatcaaggttaaatgaatagccggttggtagtacgaaagatgcaatatctctcggcacaccaaaacgctccatttttttcattactgtaggtaatactgcttctgaacttgcagtcgagaatgccaacattaaatcgttctttaatagtttgataacttgtgtaattcttacaccacaaactcttgaaacaatgcctaatacaatgaaaataaagaatagcattgcaattaccacagttaaacacaatttgaacaatggaattaatgcagataatccgaaagtaataatcgttgtagtaataaatgcaaatactgcaattggtgctaataataatacttttccaatcatccagaatactgcttctagtgcaccgcctaaaaagtctttaaccggttgtgctttttgtccaattgccgctaatgctaaaccaaaaaatactgagaagaatataactggtaataattctccagaagcaaatgcctcgaagatattcgttggtataatatttacaattgtatcgatcaagtgattgtcatatgtagattgttctgcagcttttgcagttgattcatatttagaaatatcaccttttggaagcaaatcaggatttagtccaacacctggtttgaataaattaccaaaaatcaagcccataaatatcgcgaaacttgtcataataacaaagtataataatgtcttaccaccgtaacgtccaatcgtttttgtatcccctacatttgagatcgataacgctaaagaacagaatacgataggtacgactaacattttaattaaatttataaatacatcgccaaaaggttgtatataattaattacatctttatttccatgtaatatactccctaaaattacccctagcactaatgctatgataatttgggtcggtaagtttatttttttgataactttcactcttgttcatcccctttttcaacctaacattgtccaaatgctagttttctacaaaatatattttatcataaacaaaattccactcatatattaaatttacatgcttttaaaaatatttatgatttttaattttatgcagacattcaattaaggatttataaattattttgaaaggggttataaactgataaaccctgtcaccaaaggttatttacgcatatataagtattttaaaggtcattttttaattgtgaacaaatttgtgaacaataataaaataatcatcaaaattcaggcttatttgtttatttaaatgcctaatattgaataaatataaacgtgattttgtaaaatcatgctacctcatttcatgatatacatggttggtttgatgttatttaaattacttttgaatatatgttatttttaaaatatagtgtagaaatatttaaggaggggtatcttgatagaaaacaaagaaagttttagattactctatcaagctattagagaacttgcagcagaaatgggagataatcagtttgaaactaaatctattagtctcatatttttagatctagatatcgaacatgaatactttgacaaactatttctatcattcatacaatatgtgagcaggcataaaggagaatctatctcatataagaatttactagctttaatagaagacaagatgccacgagacttatcacttcatatcaaacataaaattatcattggctttgctaataattatttaccagaactcaaaccaattgcagatgatataaaatctgctatctataatcaagtgaataaagaaatagatcttgaatgattcttgacgcacttcattatgatgcctttgcacagtttgacactttatatataaatacgttaaatttcatttataaaatatttaggagtatttatattgaaaacagcattattcttcgtcacaatttttgtattttcaatgatttggtcaatgattatcattaactatttaccggatgcagcaactgctaataaacgtgataagacacgttacaatgaaaaacagcgtttaatcattttagaaacattgactagaacttgcacttggttcatttattttttagtcatttcaattctcacaaggtatttagggccgtcaaacacaaactttgatttaatatctaagtaccccctaatcacggtcttaattcccttgattatacttggggttttgaactatttgtttgttaagaaaaaatacaagactactgattaaaacttgtaatctatgaatcaaaaagcgcctttttaatttcgaaaagacgctttttactcattcaatgaaatcaccaagtacatcattctaataagttaaataacgctgttacagccattaaaactcctaagttgataaacgttggtttttcatatttttgtttatattgctcataatcatattcgctaattttcttatttttcaatttccaaaatacaagtacaaaatagatggattggaacattaaaatacaaaatgaaacgagcaatgccacgtataatatcatttttaatatactcatataaacacccacttactattaattaatcactcgcgttgaattaataaccttaatggttaagctttcttgccatacctcattaaaatttatacttttccaaacaaaactgtataccccatctaaagcgattttaaattaattgctgtacttaatttttccagctaaatctgcgattgtctggtcatccccttgattaatcgtgaccgtttcaacattctcttcaatcgcttttgttgttgcttctttcatatttgcatcagttcttgaatcacgccaatcatatggaacatttttatatacattgattgacccatcaccattgctactatatgtcactgaaccacctacacgcataggagcttttaattttacaacgtcttctttaaagacagcactgtcctcagcttgtggatttactttagaaccttttggcaatttttctacatttaatgaatccataccatccatattatttttcagtggtcctagttgattccacacgcgagcatactcaatttcttcattattgtattgatttaaagcaccttcgtcttcatcagttgtttcattcttgtcttgagcagactgattacgtccatcattgtttttattggtattttgttgctctgttttttgttcattttgtttgctgttgtctttgttcttttccgatttgtctttatctgagttgctcgtgttatctgtattttcacttttttctttaggttcgttattttctgaagcttcgttattacaacttgctaatagaactgatagactcacggcaaatgtagcaataatagtctttttcataacagcagccaaccccttttatcaaattattaagtttacaataacatatttctaatccatttacattgtattcaacattaaaactatccataatagttttttgaaaacggctattttaatagttatttttcaccaattttacttaatcactttttaaacagatgtttattgtattgttaacaacatattatctttatgctacgcttagataaaaaaggtggctattcatgcatttaccaataccaattgcgattgtcttgggaattatttttgttattctttatacttatatcggtatgaaattaacactcaaacaccataatcataaaagaaaacattataatgtagaaccgatgtctaaactacgcatctacgtcgaagcattcttctttgtattagctggcatatcatttgtgtcactacttatttacataggatattttagctagatagcgacttttgtaatatatacgtggtcagaaaattttaatttggtttttgtaatttcaaaacataaaaaaacaaccccttaagcctatgcctaaggggttacttcattctatacgattattcccactcaattgtgcttggtggcttagatgtaatgtcatagacaacgcggttaacgtggtccacttcatttacaatacgactagaaatcttctgtaagacttcccagtcgatacgtgcaaagtcacttgtcataccatcaatcgatgtaacagcgcggatgcctaccgtgtgatcgtatgtacggtagtctcccataacacctacagattggatgccaggtaacactgtgaaatactgccaaatctcacgttcaagaccttcctcacggatgacctgtcttaaaatggcgtctgattcacgtacaatttcaagtttgtcttctgtgatttcaccaagtacacggatacctaatccaggacctgggaacggctgtctccatactaaatgttcaggaatacctaactcgatacctaattcacgcacttcatctttaaacagtgtattgatgggttcgattaattggaactccatgtcttctggtaaaccacccacattgtggtgtgatttgattgtttgtgctgtcttcgtaccagattcgataacgtctgtatataatgtgccttgtgctaagaaatccacaccttttaatttagatgcttcatcatcaaatacatagatgaattcattaccaatgattttacgtttttgttctggatcagaaacaccttgtaatttgctcatgaatcgttcttgtgcatcgacacgaataatattcatgttgaaaccttcaccaaattgttccataaccatgtcgccttcgcctttacgtaataaaccatggtctacaaagatacacgtcagttggtcgccaatcgctttgtgtaacaatacagctactacagatgagtctacgccaccactcatcgcacataggactttacggtcgccaacttgattacgaattttttcaatttcaatctcaatgaagttttccattgaccattcacctgtacagtcacatacacgacgtacaaagttacgaagtaaatcgtttccgtattctgtgtgacgtacttctgggtggaattgcacaccatagatgcgacgagatttatcttcaattgctgcatagttggtacttgggctatcagcaatcacttcgaaaccttctggaatttcgatcactttatctgagtggctcatccaaacattttgttcttctggtaaaccaaagaataactcatcagtcttcgcattaataatggctttaccatattcacgttcattggcacgctctacttttccacctaaaagttttgtagttagttgcataccataacaaatacctaaaataggtactcccaagttataaatttctgggtcaattgtgaatgaatcttcttcataaactgagttaggaccaccagaaaggataatccctttaggatttaaacgtttaatttcttccatgctaatctcgtggtcatgtaattcactatatacacccatttcacgaatgcgtcgtgtaattaattggttgtattggctaccaaagtctaaaacaagtatgagctcttgctctttcgccatttccatatcttttttatctccttttaacttagaatgaataatttggtgattcttttgtaatttgaacgtcatgtggatgactttctgctagtccagcaggtcccatgcgcgtaaattgtgcttcttctcttaatgcttctaagtttctagaacctgtataacccataccagatcttacgccgcccataagttgataaattgtatcttgtaatgaacctttatatgcaatacgaccttcgataccttctggcacgaattttttaggtgctttatcttcttggaaataacggtcgtttgagccgctttccattgcgcctaatgagcccatacctctatatactttgtactgtctgccttggaatacttctgtagcccctgggctttcttcagtaccagcaagtagactacctaacataactgcatggccaccagccgctaatgctttgatgatgtctccagagaatttaatcccgccatcagcaataattgctttaccatgtttgcgcgcttctgttgcacagtcataaactgctgtaatttgcggtacaccaacaccagcaacgacacgtgttgtacaaatagaaccaggaccaataccaactttcactacatcagcacccgcttcatataacgcttttgtaccttcggctgtagctacgttacctgcgattaatgtaacttgtgggaatgtttctttaatatgtttaacttgctctaatacacctttagagtgaccatgagctgtatcaataactaatgcatctacaccagcttctactaatttttgagcacggatgtctgtatctttagcaataccgatagcagcaccaactaataagcggccgtgttcatcttttgcagaattagggaattctagtactttttcaatatctttaattgtaatcagaccttctaaacggccttctttaactaatggaagtttttctattttatgttgttgtaataacttttctgcttcatctaatgtcgtaccaactggagctgtaacgagttgctcttttgtcatcacatcagaaattttaattgagaagtcttcaataaagcgtaaatcacggttagtaataataccgacaaattgtctgtcttctttattattcacaattggcacacctgaaatacgatatttacccattaatgcttctgcttcaaaaacactttcttctggagttaaaaagaatggatttgaaataacgccattttctgaacgttttactttttgtacttcatcagcttgatcttcaatattcatatttttatgaataacaccaagtccaccttgtcgtgccattgagattgccatttttgattcagttactgtgtccatacctgctgaaataacaggggtgtttaatttaataccttctgataattgcacacttaaatccacttctttcggtaacacatctgattctgctggtaacaataacacatcgtcaaaagttaaagactctttttcaaatttattttcccacatacgcttacagcctcctaatatttgtttgataacatcattatttcataacttccgtatcttgttgctgttttataccattaaaaaagaaattcaaaataattgctgaaattgcgccaagaacaataccgttttgtgttaaccatgcaaattgctcacccaaagctttgaacgcttgcggtactgcacttatacccgttcctagtccaactgatacagcaataatcaataaattattttgattcttaaaattaatattacctaatatactaacaccatatgccatgaccatgccaaacattgctatcatcgctccacctaatactggtagaggaatcatattagcaagtgcacccaatttaggaatacaaccacaaatgattaacaagataaccatgccatagataactttattctttttcgcaccagataatgacactaacccaacattctgtgaataagcggtatacggaaacgcattaaagattgaccctaaaatgatagcaataccttctgctgtataaccttttcggaaatctttacgttccaattttttacctgtaatttcactcaatgcgtgatatacaccagttgattctattaagctgactaatgcgacaataaagaatacgagcgttgcacctaagtcaaagctaaacgttgagaacctaaatggttgtggtaaagagaaccaatgtgctgtgccaacttgattaacatccacgataccaaagagtgcagctaatactgtgccaacaatcagtccaataagtatggcaatagattttaggaatccagcagtaaaacgctgtacaattaaaatgatgatcagcgtaacgacacctaagatgatatttttaggatcaccgtaatgtttatcaccttcaccgcctgctaagtagttcatcgcaactggcatcaaattgataccaataatcgtaacgacacttcctgtaactacgggtggaaagaacctaactaaataagaaaagaatggtgcgataagaactactagtatacccgataagaataatgaaccatataagtcaccaataccttttgtttgtccaattaaaatcatcggtgccacagctgtaaatgtacagcctaatacgattggtagtcctgttcctgtgcctttccatacttgtaagaaggttgctacaccacacatgaaaatatcaactgttactaaaaaagcgatttgttctggcgtgaaatctaagctagtacctacaataataggaaccagtatcgcacctgcatacatcgctaataaatgttgtaagcttaagatgaacgttttcatgcttcgtctcctacaaacgtcactttattaccacttaatgatgccactttacataaagatgaaacggttaaaccagcttcttctaaacgttctctgcctggttgaaagcttttctctacgacaatacctatacctaccgttgtagccttagcttgtttcacaatttcatttagcccaagtgaagcatcaccattggctaagaaatcatcgatgattaatacgcgatcattttcacctaaaaactcatcagacacgacaacggtacttgtcgtattttttgtgaaagaatgaatctctgcttgataaacaccttttttcaatgtactcggcttcgcttttttagcaaaaagacaaggtacgtcgaagtgcatcgcggccataattgctggtgcaatacctgaagcttctatcgttaatatcttcgtaataccttcatctttaaattgctcataaaatgtttgtcccacatcgtgcattaaccttgcgtctatttgatgatttaaaaaaccgtcaactttcaatatcttttcatcaatcacaacaccatctgcttcaactttctgcttcaacaaatccactcgaaaaaaacctcctcattttgtgtacaaaaaaatcctaaactaacttagtttcaggatctatgagtgaacgtgcaataccaaagcagcatcgtttcaattacaatatatgtccttaaaattaatttttttacattcatttccctttaactatgtaaaaaaagtattcttaatgaacaaagcttatatgtatgagcgctttaaaaagtctagtttctttcacaacttttcataacttctcaatttgaatcgctagtgtattgtattggttactcatagtcatgttgttaatggcaacatggtagaaacttctaaagccgtatccttcagattatatgagttagataaattattaactgatgatagcaaattttggcaatattttcaatacacttattgattgtaaacgcttcacaaaagcttttacttctttttcatattttttcagaaaacattcacatatgcatgaaaatatcgtttgtcagttgtgtaagttcattatacaatgtaattgtattcgttttatataataacttaagggtaaacacaaaataattcatataataatgaacggaggaacactaaatgtcagaattcactattgtacaaaacaaagaagatcttatcgatgcaataaaatctaaactatcagagggttataaagaatcggaaatgaccgtaattagtaaaacaaaattacacattgatgcgttacatgattctgaagtcaatctaactgctacaagtggttcgttcagtgataagatggctaaaattttaactggcgaagacggtgaagaagccgtattggctcactacaagctacctgaagaagaattagaacgctataagaaagaaatattaaacgataattatctcgttgttgctacaaaggatacgacttcacacgtagaagccgacaaagccaacgttgctttcgaaacgaaccaaactaaaagtaatagccattactccgaagaaacaaacggaccaaaatcataatccaaacgttatacgtaaatcaaagatggtactggaggcgtcagcttaaactctcatttcaccaaaaccattttgagacgcatttgcgaagttagattaagtactgagatactgtttgattaatactacaacatttgtataagcagtactaacgtaaacatataacgcccttataatttagtcggtcgagacacacatattgatgtctcgaccctttttatgtttaactgcaaattaaattaaattgcaattcgattcatattttctctattatgttataatgaacgcaataatttgggggtgtacctatggagtttaagacaataacatcaatcgatgatccgttatttaaatctgcattgaagttatatgatgctaaatttgatatcggtctatctgaagacgaacaaatttttaaacagtccttaagaaacgaacgtacaaaagatgattacatctttttagtaggcattgaatcagatgaagtagtgagtttagccacagcgcattatgaagctacgacaaattcatcttttttaatttatttaattgctaaagataaacacgagcatgatgaaattatcacaaaaacgcttgaacgtattcaaaaagaaataaacattctgtcgaatcaactgcatgcacatgatgtcaatttcattatgttggaagtgcctaaagaacccgaagacatttctgaagatgtcgttcaaatcatggataacagacgccaatttttatatgaacatggttttgaaaaacaatatgaaattgattatttagcccctaatatccaagattatgcgagcggcgaacctatggatttatttataaagtcaaatattgaattaacaaaagatatctatggaccaagcgtgaaatcaaattatattctcaagtatgtttttgcaaacagaatttctcgaagtgttatttatccgttgcttgaacaaatggaattacgcaaacgatagttatcaccacttgaaatcactgttaaaacagtttaaactaacatagaggtaagactgacgtttcactgaccgaagacaaacgtcggtatacataaattaattaatgaaaggacttatttctatgttaaccaaagaatttgcacaacgcgtggagctaagtgaaaaacaagtccgtaaaatcgttcagcatttagaagaacgcggttaccaacttagtaaaacagaataccgtggccgtgaagctacagatttccaagaagaggatatcgaactattccaagatatcgccgataaagttaaacaaacaaatagttatgatttagcttttgaagaattagaaaaagaaaaagacttcttacaagtattagtcaaagatgacggtaatcatttacctacagatcaaaatgtttctaaacttgttgaagatttacgttcggaaattcaaaaaatgcgtgatgaacgtcatatgcttggtcaaatgattaaccaagtacatcaacaacaacaggaattacacgaaatgcagaaccaaatcactacaaaattagacgcaaatacagaatctctaaaagcgattcaaacgtcaacagatgaaatcaaaacgacacagagcgttatccaagattctcaaaaagaacaatctgagttagctaaatcaaatgttgaaactgaacatgttagcactgctaatacaacaacgaataacagcgacgcgctaacagaacattcaactgagagtgcgagcaatgacgaaaaatctgatgataaagttacttctacaacttctgaaactgtagctgatacaactgatgcaactgcttctaacccaactgataaatcatctgcgcaagttgcgactgaagaatctgaaatcactcaaatcagcgaacaaccaactgaaacgacaacagctgatacagatgcttcaacatcagctacaaaaagagaaatggcttctgctgaacaagtcaaagcagatgacaaaacagatgaaacttctacatcatctactgataattcatctattaatgaagaaataacgaaaccgaacacacaaacgcagccaactgaagatacacatgcgcagtcttcatcagttgcaaatgacacaccaaaagaagaacgtaaaggtttcttcgcacgcctattcaatctataaactatttaataaatggtgctaattaactatcaaactaaacgaattctaaatcacagaaatgtgatttagaattcgtttttttatttcattctctaaacggtgaaatcatcgttttgctacctttaaattatcagaaaataaagtcatttaaaattcatgaatttcttgagtcatagacttgaatattattgaaattgctaatatccttagtatacgtatcggatttcaaaaaattattattaagaaagtgtaggtctttttttatgttattaactattcttaacattattatttttgtggccttcctcgttggattatatgtaatggctaaaagacatgtatcatttcctaaacgtgtattctctgccttaggggtaggaattgtttttggtgtcgttattcatttaatttacggcgtggattcacaagtaactaaacagtccatggattggtttagcatcgttggtgatggctacattgcattactacaaatgattgtaatgccacttattttcatttcaatcgtttcagcatttactaaaattaaaattggggacaaattcgctaagattggaatttatatttttattttcttaattggtaccgttgctattgcagcaatcattggtattatttcagcactcgtattcggactagatgcttcatctattgacttaggcagtgccgaaagttcaagaggtagtgaaatcgcaagccaagctaaagatatggctgctaatacattaccacaacaaatcttagaattattaccaagtaatccattcttagatttcactggtcaacgtacaacgtcaacaattgcggtcgttattttcgcagcgtttatcggttttgcatttttacgtgttatgcgtaaacaacctgaaagtggacacttacttaaacgtggtatcgatgcattatataatttagtaatggcaatcgtgacatttgttttacgtttaacaccttatggtattttagcaattatgacatctaccattgcgacaagtgattttggtgctatttggacattaggtaagttcgtgattgcatcttacgcagcactcattgttatgtatatcattcacctaatcattgtttcaggtttaggtctcaaccctgtcacatttgttaagaaaactggcgaagtgcttatgttcgccttcacttctcgttcaagcgcaggatcattaccactgaatgtgcaaactcagaagaaccgtttaggtgtacctgatggtatcgctaacttctctgcttcattcggtttatcaatcgggcaaaatggttgtgccggtatttacccagcaatgcttgctgttatggtagcgccagcagctggtgtagaagttaacttacaatttatattatctgtcatcggtgtcgttattatcagttcatttggtgtcgctggtgtaggtggcggtgcaacatttgcatccattattgtattatctacattaaacttaccagtcgcacttgcaggtgtcttaatctctgttgaaccattaattgatatgggtcgtacagcattgaatgttaatgactctatgcttgcaggtacaggtacagcaaaattaacaaacaacctagacaaagacacttataacgacaatgaatatgccgagattacaaactaatatatttgaattaatcactaaatccgagtagcaagtttagtcataattcaagtaaatggaaaaaggttggaacacatactgctcgtttcactgtctcacaagagatagttgaacgttgtgttccaaccttttttatagtttttatcaacttcttatttaatatcactaattgcgtctaatactctggtttaaaaggtccccacgtgattttatgttttccatcgagcgacagtgtatcgattgattttgacacatcatcaaaccactttagaaatgcaagtgttttctctaattgtgcttctatactgtcttcggtaatgtcgtgaagataccacgctttactttcaaattcatattgaacttgagaatacgcgagtctcgtcatatctacactattatatatacagtttatttgtttaaccatattaggcgcctgagtaacgatactatttgaaatgacctttttgtgcgcttcattatctaaatcattccacattcttaactgtccattcatttggaagaatatatcaatcgtagggtctttttcatcaaaggagatcaagatgaagatgcgttctgccgtataatctactgaattaataacaccgacaattaatttttgagccatcttttcccaatagtgttgggcttcatcgggcgtgagtttactatttgatgaataaatatagttttcatttttattctgaagctccgaagcatctgatttttttctaaaaatcttatcaaacatattcaacttaatcccccctttcgagttatctcaggatattaaaaatattgaaattattataagtaaatctcagtttttcaatgaattattttttaataaatcctgatttattcagttgttctaacatatctagtcgttgcttcgcgctcataaagttagcaacttgattagaccatgattcagtacgttcgccatttgtacgtgaactataatagtcactcactgtttgatcatatgcttttaatgtttcacgttggctatctttatcactatcatatttattagcatgaaatacatgttcaaatggcaatcttggtttagggctaccattttcatcatcttctggaatacctaatgccataccaaaaagtgggaaagtatgtttaggtaattctaaaatttctcttactctttccacatcgtttctcaatgaacctaaatacaccatgccatagcccatatcttcagctgtcgctgcaatattttgagctactaatgtcgcatcaatagtgcctacaagtaatccttcagcagattcaaatgatgtttgcatatcatgtttagattcctcattgataatggaatgtctataataatccattacaaaaacaaataaatagccattttcaacaacataaggttgcccagatacttctttcaattcttccttaatttctggatcattgataccaataattgaataggcttgtaaataacttgaagttgatgcactttgaccagcttctaccagttgttttatatgcgcttctgatattggttcctttttaaattttctaactgaatgatgattcttcaataagttgtatacatgctcagacaatgttaaccgctcctctttacataaagttactcatagcataacaaaacagcgactgctttgtttacattatgtttacccgttttcattactattaaaagacttagaggtaaataacttacttattgcaatacagattaatcgtatcattataaaaaaatcgcaccatgcatggtttattaatagttaaattattttatatcacggtacaaatccaattaatgggtataatataattaaaatcattcaatcaataattgcgatatgttatacataatttttctatatttttttatgaaatacttttaaatcacagatgcacctttaggttgctttaaaatatatgatttggtgcgtgacgcattaaaggctctatattaaattattcgtaaagagagtgattattatggaaatcggatcaaaaacaaaagaaaaacgcgaacaaaaacactggtctcaagacgaacttgcagagatattgaatatttcaagacaaagtatttcaaaatgggaattaaacaaagtttatccaagtattgatatgctcattaaaatgagtgatctgtttgatatctctttagatgaactaatcaagggcgacaaacagtttaaaaaaacaatcattgaaacataccaagatcctgtatcgtatcatcatcaaaaaagaggcatgaatggttgggaatttttagctggaaactggtggctattcttccccatcgcgggcatgatttggtgggtgttgcgttcttttatttaacaaattgaataacatcgctcaggacagtctgctatccgtctaaacaatgaaattattgattgctatatagcttataaaatatgaacagaccataagcacgtaaatattcatctatatgaatttaatcagcacccaataataacatactttttttaaatagcctttcttctcattttcatgttttagttgagaatttaaaggctatttattatttatacagcgttattttataaagtataacgctcgattttaatgtaaaaatacatttttattgtatactgaaacacagagtcaaagtggtttttttaagcgttttctcaaaattcttctgtgttgacgaataatgagggaaatgcaataatagaatacgaagattagaattattataattaagaaacagaaaaatctacccttacttaattctaattgaaaatatgttattaaataggaggatatttttatgtcattaataaataaagaaattttaccatttacagctaacgcatacgatccacaaaaggatgaattcttcgaagtttcagatgaaaacttaaaaggttcatggagtgttgtttgcttctacccagcagacttttcattcgtgtgccctactgaattagaagacttacaaggtcaatatgataaattacaagaattaggtgtcaacgtatattctgtatcaacagatacacacttcgtacacaaagcttggcatgatcattcagatgcaattagtaaaattcaatacactatgattggtgacccttctcaaacaatcacacgcaattttgatgtattagatgaagatctaggacttgcacaacgtggtacgtttatcgtagatccagatggcgttgtacaagcagcagaagttaacgctgacggtatcggccgtgatgctagcacattagtacacaaaatcaaagcagcacaatatgtacgtcaacacccaggcgaagtttgcccagcaaaatgggaagaaggttcagaaacattacaacctggtcttgacttagtaggtaaaatctaaggaggcattgatttaaatgctaaatgatcagcttaaatcacaattgcaacaattacttcaattgatggaaggcgacgtagttctaaaagcgagccttggttcagatgataaatctaaagaactgaaagaacttttagatgaagtatctgccgcgtccgattacattactatagaagcatctgacttgaaacgtacaccaagcttttcagtagataaacctaatgaaacatcaggtattacttttgctggtttaccaatgggtcatgaatttaattctctagttcttgctttgttacaagtaagtggtcgtccaccaaaagaagaacaagccattatagatcaaattaaagcaatcgatcgtccactacattttgaaacgtatattagcttaacgtgtcaaaaatgtcccgacgtagttcaagcattaaacttgatgagtttattaaatccaaatatttctcatacaatgatagatggctctattttcagagaagaatctgaaaatattatggcagtacccgctattttcttagatggcgaagaatttggaaatggacgcatgacgatccaagatattttagcaaatcttggtagtcaagcagacccagctgaatttaacgataaagcaccatacgacgtattaattgtcggtggtggtcctgcaagtggtagcgctgcagtctacactgcacgtaaaggtttacgtactggtatcgtcgcagaccgtatcggtggtcaagtcaacgatacagctaccattgagaactttgtcactgttaaagaaacagatgggcctaaattctcatctgcattagaagatcatattaaacaatatgatgtcgatgtcatgacaggtattcgtgccagtgatattgaaaaaacggatgacggtattgtcgtaacattagataatggtgctcaattgacgagtaagacggttattatttcaacaggtgcgcgttggcgtaaactagaagtcccaggtgaagaagcattaatcaataaaggtgttgcattctgtccacactgtgacggcccattatttgaaaataaaaatatcgctgttataggtggcggaaattcaggcgtcgaagctgcaatcgacttagctggcatcgttgaacatgttacattacttgaacgtaacgctaaccttaaagcagacaatgttttacagaaacgtttaaacagcttacctaatgtaacagttattaaaaatgctcaaacaaccgaagtacttggagacgatgcagtgactggtattaaatatcaggataaggcacaaggtgaggaacatacgctagatttagaaggtatctttgtacaaattggattactacctaatacagagtggttaaacaattatgtagaactaaatgatgccaaagaaattaaagtagaccgcacgaatgcgacaagtatcccaggtatatttgcggcaggcgatgtcactgatgatcgcaataaacaaattattatttcaatgggcgcaggtgctaatgcagcattaaatgcttttgattatattatcagacattagtaatacccattatcgtcactgaaaattaaaaatttgagatataaatccccccattctcaaataagaggagtctgagacataaatagatgttttaggctcctctttatatttaaaatctcactatttagaccgtccatgtttgcctaaaatctggttcaaatctatagtctctcactcatactatttccccacggcgtcagcaaattacaaaatcactacaatatatgaatgcccaaaaattaagactttttcacataaggaaatgactgacatctcattgtaaaacgaatcaccgtgtcaactagaggtattcatctcccatatgctttttcacatcatatagcttatttgatgattaattgaaatacagcacatatctaagtaacattttattatgaaaatctaatgaatatttttaaaattactaagttcatctcttttcttttatattttgttcaaaagattgtgcattttattatttaatacatcattcaaataaatagcactacatgatacgcttaagttataatttttaagaacgtgtttatacattcattagtttgttatatacgtatgattatttttaaaggagcagtttttatttatgaaaaaaagtatattactctcattggtcttagtgctaactgtgatactcgcagcatgttcaaatgatgaatccgatgatgacaaaggttatagtggaaaaaacgcacctaaaaatgttaaaacaattactgaacaagacatctttaattcagacaaaagtggcgaaacactaagcgaagcagaagctaataaagcaattaaaaaatatctagatgtgaactcagatattatagacaataagtatctaatccaataccaattagataagcaaacaggtacagatacaaagattaccgataaacaagcaaaacgtttatccgaactatcacataactcagttaaaaatgatgtgcgtttcaaaaagttcgtaaaaaacaacaaattcccagatgggtatgaagaaaacctcgatcgaatcgttaattactttacagccttaaatagcacaatcaaaaatgctgacgaagacattgagcaattagattaccagccacaaaacaaacttaatgttgcagatgtaccaacaaaatatgctggagatgttaacgggaaacaacaagataaaatcaaaaaattcttaaaagataaaggtattaaatctgacgccgtcgacaaataagtgacaaacttatagtttagatatgttttccaactctgtcgctacctaagtatttacaaaatattcggttaagttacaaagagattacatgacaccttttcaaatttataaagggctcaagcctatttatatccatattaaccatggtctatgacttatttctgtaaaaaaccttacttaattgtaaggttttttaatatgatatcccttttttttcacaaagtaacatttgttatgcttatttataagttaaagaacaaatgcatcgaagctcagccaatcaagtaataattttaaggaggaacacctttatgatattaacaattttaataggtgccatggctgctatcttcatagcttttaatctctttgagaagaaagaaaaatatggcgttgtttcttataaaacaatcgcacttagtgtaacttacgtcatacttgccgtaattgtcggaagttttttagacaatttcaatacgctattccaaggatttcatgatagcttaacagcagctaaaagatattaacctgaaccgacgatgtcgtagttcaggctttttatgttaatggctatttttctagttcataaggtaaacagttttcaatttttctatcaatcactgtagcttccgaatcatatcctaaatatacgaagcaacaacgtataacaacttgatgtgctacgatagcaatggaatcgagtgaatcatcaatttcattttcaaaaaattgtttaacacgttccataacatccgcataactttctccctctggcgccttttgcgtaaaactgtgacgaaattcaagataattttgatcttcaaaatagcgtgtataagatgaattttgttccactgcttcaacaattttaccttcaaaaacaccaagcgaacgctctcttaacaaaggggtcacgcttaccggaatcgatttatcaaatatcgcattataagtttgacgtgtccgtaataaatccgaaatataaatatgatctattgcttttttgtcaaaatagctctgtaataattgagctgaccatgtgcctctctcagtaagtggtacatctaattgtccacagaaataatttttcccttgtttcttatcataatttgattgtgactcaccatgtcttaccaaatatattttcatattaaccatcctctcttttcgtatgcatatgcgcatgattaccataatcaattggattaactaacaatactgtcatgttaagcttttactctatattttttgaaactaccttgttagtatactaactgaggtgatacaaatgaatgacagagttatacaaaacagtacacaaggagaacgtgttctcgcagcactgagttattttagtatcttttttgcaccaatcatattacctatttttatatggatttttgctgatagacctacttctaaccacgcagctaaatcgttagcttatcatattataacgtatattggaccgatacttttaattctcagcattggatttggtggcgtcttaatcaataatagttctaccattaccagtgtgataatgattacagtggcaattattttattcgtcataaccgtttggtatacgatcaaaaatatttatcgtggtgtcagagtattgatctctgaacacgcttatttccatccctaaactgaatagcaatttattttttgacaaaattagcaacattttaaaaggttatatacgaatttactttaatcctttatgcttaacataaaaggagacagagtatatgaataaaaaattaacaatttctatcattagtattttagtcattattggtgtcgtcttcaccatctttatgattacatcgagtcaaaagagcacatattatggctatatgtcagatagtacaactgctgaaaaagtggtcagtgaaaaagatggtctcgtgactaaaaacgttaaaatagacaataaaaatgacgatttcaaacctaaaaaaggtgactttgttaaattagtttctaaagatgacggcaaaacattctataaacaagaagttgtaaaacacgacgatattccacatggtttaatgatgaaaatacatgaaatggaaatgtaatctatacatttaatgtgattactacacaaaaagcagggaggctcatagagaccttcctgctttttgaatgtagacaaattctgcgcaagtatatgcgcggagtttatctattttaattattagtcttatttttaatacagaatgagagtgggggcagaaatcaaattttctaatagagttctcgtaggctcacctatgcaatcaagtcaatattttattgacagtgatttatgtcgactcctgtgggaatagcactagccaaagactacaggctaaggcagtgccgcggaaagtgtgcataaaaaaactgccaacaaagtcggagactttgtcgacagtctgaaagcagtaaaattccgttcgtgcactatcgattctttttatccttaaaataaagcaatagctctattaagaaaacgataataagagaaaaaccaaataatggcatcaatatccctaatataaccagtatgataaccaatggaatagacattggctttttaactctttttggtattttaatttgcgttgctttcattttcttaatccaagacgttagacccagtcctaccgcagcaagtaatgcgatacatacaagcaagttaatcactttattggcaataccgaacaaatgaccttcatgcagaggaataccccatgtaaaccatttaccaattatgccgtactcttgatatttcaccttacctaaatctttaccattatattgatctatatataacgtctgttcatcgtaaggtgacacgtctaagcctgtcacacctgtattactacctttcgaaactgtaaatgccgcttcttcactcgttggataaacaattgaaaatggcttcgtaatgccatctttttgtgcttctgcaacaactttatcaatcgaaatttgtttttcaatatctgttcttggcatttcaccactaccatgatgcgcagatccgctctcagactctggttgcttatttttacgtgttgcccaaggtatttcattcacatctgatttaggtggattaactgccaattctgactgtcccaactctccagaattatccataacactcgcaattttagcccccataaatccagaccatggcaagccagtcaatacaagcacaaacaccggtatggcaatgataatcccaagtgtagcatgccatttttggaatcttaatcgcttacttttatttgtaattaattttttcttaattaacatatacgttccagacaatatcatgaaaatagtccaacacgctgtcagttctaccaagtaattaataaaagtattttcagtaaataatgagctatgtatatttcgtacaacgttcgcatacgtatgttttgcattttgatcagcaacaatttgattattttgatctagaaaaacataacgttggttccctgccatatcatctaatgtaattctactattataaggctcttctaaaatactaactttacttatgtaaaaaccatcaaatttatcttctacttgatcgactgcctgattaagtgattgatgttcttttacaggactatcaccgaaaaattctgtcttataaatattattttctacttcttggaaaaacagaaacccaatgcccgaaattgttaacgtaatcagtagcggcgtaataaataacgctgcatagaaatgaagcctctgtaatggattaaatatatttttcaaaagtttatttcccctctctcttttaatattataaataactaacaagattattgtgtagataaattgtgaatatttcaaaagagttttaaaaacaattatctacaatttaaattattttgtttatttatgactatggtaacttgtaatttaaaatgggataaaataaaacgtccaacacatcaagtaatgtctcagacgttcatacatggtatttaactacttttactcaatagcagattaagtgataagccaatcaatattgcgccaaccgtataatcaaaaattgcttttatttttctattagtaaacaatatcttaatatattgaaaatataaacacagaaaataaaccagagcaaaataactgtggtcacaattgcagttaatatagcaattttagatgtaacagcttcaccagtacttaaaaattgcggcaatatactgatataataaagtaatgctttgggatttaaaatcgtactaaaaaaaccttgtctatatgaacttaaataagtaatacgctgtgctttcatctgagatgttgaaaagttcatactttgtcttgcactgatgatacttctaattcctaaatatataagatatatagcacctaaaatcttaattgtcacaaagacataatacatattagccagtataaaaataataccgaacacagctaacaatgaatacactatatgccctgacgcaatacctaaggctgccatagcgccattaccttttcctgaggtaattgaatttttcattacgacaaagaaatccggccccggaacaataataatcattaatgttatgataataaatgctgccaaaccttccatagactacatcccacctttgtacttcaggcatcagttaccaaatatccccgcaatatcgtaattaacagtttttattttaactcatatgatttgaggaaaaatgaatgcttatgtgacaatattacatttttattgaagcctgattactagatatgatatattaaaggtgtagttggaaaccgactactagtcttttatattcatgaacatattactcttaaggcgacacggatgtgtcgtctttttttatataaacgtacattgtctacactgcaatactgtgtttcgagatccttcacgtcctatataaacttgaaaattgaataataccgcatcacatttttgaccgtataatatttaccaaattgtccttcactttaactcactaattttaaaccaatcgtacttcccaatatcactaaaatacatactactcttttaatatccttagattcattataaaagatcatcccaagaattgcgccacctactgcaccaatacctgtctagattgcgtacgctgtgctcatcggaaggtacatcattgcggtagataatgccatgaaactcacagcaaaaaagaaaatgagtcccattgcatctcgtttttgacgatgatgcacatatgcatttaaaaaatttatacctaacatttcaaagacacctgcaaaaactaataagatccatgccattatgcttctcctcctttatttgtagttactaatttcaggctaatgacgcctgcaagtaaaatgacaattaacattattttcataacattaaacggttcgccaaaaaacaagaaatcaaacaacgtaacccatgttgttccgagacctacaaacacggcatacgctgagcctacaggcagaacctttgaagcatctactaataaataaaagcttacaaatatagcaatcatcgtaaacagccattcccaccaagatgacgcatgggttaaaccaatcacccatcctacttcaaaaaatgttgcgataataattttgatccaattcattcctatgtcctcctttaaaataaaaaaagcctgggagatagtgttaattactatctcccaggcttttatccttccgtgtcacataaaaatatgtggctttctctcggaccagaccaaagtaatcatcttgcggaaccctagaaagctttattcgattaattgtatcgtagcaaattacactaacgattacaagcatgctcattcatttcacccagtttaaaataattattattaagaaaaggcttaagcatgcgtttacatgtgaaattttacaaatttctaagattttttaagtcaaaaccctctacattttataaattttaatgtataatcagttatagattataattattataatatagataaagatgagctgaaatttattctcatttacatcaatcaatgcttcaaatgcattgaaatataatataagcgagggataacgatgcaattactaaattataaaatgcacaatgatgaactaatcgctactgtactttccgacaaaaagcaattatttaaatatacttttgatgttacgacgccagaatatgaaatattagatgtccttgaagaaataaatcactatgtagacaatggacaacacccacttggttgttctttacttaaaaattatgcctacgaggacgtgagtcacaatcttttataatcttctttacacaacaaaaagatgagtatatctgctataaattaaacagtatactcatcttttaattttgcattattataaatagccattccagtttttaatttttgaaatccaatcgcttcgtaaaatgattcattcccagttgttgcgataagatgaatacaagaaagttcccccaaataattcaccatttcttgaacaattttattgccaacgcctttagattgataagcggtatctactacaacatcataaatcgcggcattaaacacaccatctgacatcgctctggcgaaaccaatcacttggccctctctttttgcaatcacgacatgtgtcgcagtattaaatagtgtaatcacttcttcttgattatggccattccaatggttcccatgataaatgcgcactatttcatctatatcattcatatcaaattgatactcatattttatatccatttagcacaccttccaaaataattttcaatatttataaaccacatcgttctttatatatgaattattaaataatatatatattttaacatgaatctttaaaaattaatggatgtcatagcaatctattgattttaatacatattaactaatttcattattacgtataacgctgatcatgatgtataaatagaaatatacattgtacacgttaattattagcgactgacgggtaaatatatattaaacggggcgataacattgtcacgcaacgcaatcaatactgaatatttattaggaggcgacttatcatgtggattggttcaatcatactcatcattgtcggtattgtgttactcatcataaatcagcagacttctaaaaaggaaggcgtaagcaaaaaacaaagttatattagtatcggcattgtttgtatcattattggtgctttttaccttatcggacagattattaaagccttggttagttaaagtcatataaaaaagctcgggtctattatgagacccgagcttttgcatacttatatcgaacgtgaaatttagatttatttacatattaaataaatcattaaatgactctaccatcgttggatgtgtataaatatttgtattcaatactttatatgataatttttgatcaatggctaatttcactaaattgataatttcttcagattctttaccatataacgtcacacctaagatggtttcgctgtctttatcaacgactgctttaaataagcctcttgggtcgttgtttactttatgtctagggattgtattaactggaaccgtattttctataatatgatatccctgtgcttttgcttctttactagttaaaccaacacgtgctaatggtggatcgataaatacagtataaggcaccgcgccacgattttcagtagaacgttcaccatttccaaataattgatctttcacgattctaaagtcatctaatgaaatatatgtgaactgcataccacctttaacgtcgcctaatgcataaacgtttgctgcagttgtttggaggtgttcatttactttaatttcaccatgttcacccaattcaatatctgtattttcaagatttaaatctgtattgggtttacgaccagtagctaatagtacagcatccgcttcgtatgtgccatctgtcgtatgaacaagtgtacctgcttcaacatcttcaaatctttctgtattcgcgtttaagacgatatcgacttgtttatctgctaagtcttttttaacttctttaacgatatcttcgtcttctctcggcatgatatcatcgccacgttctaggacagtgacttgtgtaccaaaattggcaaatatagatgcaaattctaatgcaatatagccaccaccgacaataactaattttttaggttggaaatctagattcataatacctgtagaatcatataaattttttgaactttctacaccattaatcggtggaataactgattttgcacctgtattaatgactacatgctctgcagataatgtttctaccacatcaccttgatcatttaataaattgacttcgcgattcgatttaaatttagctgtgtaatctaatacatcaatattgtcttcatctgctaaattatgatagttcttgctatttaatgcattgacaacatctgtttttcttgaaaatgcttggtcaaacgaaccatggtctaagccttcatgtacaagtgttttagaaggaatacaaccgatattaatacaagtaccaccatacatctcttgagatttttcaacgacagctacttttttaccttgtgctgaagcaaatttcgctagtgttttaccacctttaccaaatcctataatcactaaatcatactgtttcatgagaatcctcctttaatacttcatttaatacgtcatggatagttacacttttataataatcaattagtaaggcttgctctcttttatgaaaattagacattgtatgacctatttccctggaaatttcacagtcactaccttcatcacctgtaaacaatcgtccatccgatctttcttcactaaatgcaacaaataattcagcgagattcaccttcattgtttgatcattcgcttgatagccaccatatttaccacggcttgcatccaagtactgttgatcattcaattttcttgtgactcttcttaactgtacaggattaacacaaattcgttctgctaattcactactactataccgttcatccggatgtttcactaaaaacgtcagaagatgcacagcaatattaaactctaaattcatgaacatcaccttttaattgtaacttttataattacattaaaacgcatagcgtttactttgaaaagtattttgcttatatttttgtattccctcttttttaacttttataaaaaaaagagcgagattgcatctaattaatttagatttctatttctcgctcaatcactttcactataaaatggctgctctaatggtaacgccatgctctaagtagactttcaaacaactgagcatataaacccagccttctttttgacctaataattgcttcacatcttgcgtgtcgaagtctttttcagttgttgttacaacagtgcccgcttcactctcttcaaattgaatggttacaggatgtgcaccccaagtaaacgctattaactggttatcctccacccgctcaatgttgatatttaactcagcatcatattcttcataacggagtgtaatggtcttaccttgttcccatctttcagaactagaagagaaccagaatcctccaattttctctggatctacaaatgcttcaaaaacagtttctcttggtacatcaacttgcatttttgttatgatatccatcccaaccacgtccttcctatttgtataatataatatgaattttacatatgtttgacatgatttgcacttagcatgatattttatgacgatttgacttcacatagtttgaacagttaattattttgtattacttgttttattttatatacttaaagttaagtaatacaaaattatggaggcgatataatgattcaaagattagatgaggtaatgatttatgtttataatcatgataaagcaattactttttggactaaaaatttagatttcaaagtagtagaagatactgaagaattgcaaatgcgtgtggttaaattggcacccaatgacgatgcgcaaactgccattgttctacaagacaaagctaaagtagatgaaatggatatgggcgttagcactgatacaccctctttgatttttgctactacacaattcgatgaactatttaatcgtctaaaagatagccaagtaactgttggcgatattatgacattaactatgggacgcgtttttaattttgctgatgaagaaaacaactattttgcagtaaaagaagtttagattccaacatagtttgagccgttctattttatttgtcattgatattgataatgggctaactgtctatcattcatcactttattaccaaagtaacaagattgtaataaatatatgacacgattaatgtttgatttctgggagtgggacagaaatcaaattttctaatagagatttcgtagtcccaccccggcaaggatgactaggattgaaatgtttacctgagctaaagctcatgcataagtctcactaacttaatgaattaatcagtgagactttacattttcaattcagtcatctactacctaaatgaaaaagagcctgtgacatctatttctgtcttaggctcatgcttaacaagggagtattatgaaaaacgcattccattcttatttatattatttaattatgttgattattgtgggaattattctggctacactttattttttatatgtttggaaaaatgatcaaccacaaaatcaagatcattataaaaatttcactgaacttaaatcagatactaaagaacatcgtgattggcaaacaaatgccaaaacaacaaataacaaagatatactcgttacagcgattcatggaggaggcattgagcctggcacttcagaattagctaaacttatttctaaaaaaggtgattataatttatatagttttgaaggtttaatgaaatcgaataatcaaaaattgcatattacctcaacccgttttgatgatcccaaactaattaaattaacgaatcaatcaaatgaatcgatttcgatacacggtatacaagaacagaagaaagttgtctatatcggtggtaaagataaagctatggccaaatcaattactaaagaactcgaaaaagaaggatttaatgttgaaaagagccccaactatgttaatggagattccagtaaaaatatcatcaataagaatgatacgggctcgggcgttcaattagaaatctcaactcagtatcgtaaatctttttttgatcatgggcgtctcgatagaaaaacacgtgaaaatcccaatgattataaacaatcaatatacgattttgctgaagctgtaacaaaaggtattaaggaacaaacaaataaaaattaataggcaacttaaccagaatcgttaaaactatatgacgattctggttttttaaattcaaaaagttttctaaaaaatttactttcttttttaaagtataggtataaaatacaattgattaaaatagtaaaggaaatgaatcatgaaacaattaactaagcctttatacttttacctattactttttattacaacaacactgattggcgcgttactattatatttgccaatcacaggtaaacatcctattgattttgtggacgccttttttatagctgctagtgcatttacggtaactgggttagctactatagatgtctctacccaattcaattggttgggcgatacgattatcatgtcactcatacaaatcggtggattagggatcgtcactgtgacacttttaacctttatattaatcaataagcgaattagtaataaaagtcgctacctcgtcatggcaatgtggaacattgatacgcctgggggcataatccgcttaatcttacaatttgttttgtatagtttggtaactgaacttgtaggtgcgttatgtattgcgttatcctttattccaaagtatggcttaggacaaggggtgtttttaagtatattcacttctgtgtctgcttttaataatgctggttttgcacttttcaaagataacctaatcagtgcggttaacgaccctattatcactataaccgtgcccttattaattattatgggtggcataggtccacttgtatttcttgatttagtaacaacacaaaaattaactaaacttaaattacattccaaaatcgttttgagtacaactttcatattaatcatcgtcggtagcatttcgtttttcattttagaatatccatccacattaaatcatttatctttgattgaaaaaattggagcttcattttttcaatccgtcacaacacgtactgctggatttaataccgttgatatcggacaaatttccacacctacatcaatgatgatgatgttatttatgtttatcggtggtgcacccatcagttctgctggtggtatcaaagtaaccagcttagttctgacgctattatttataaaaagtacattaagaaacgagagccattcagctatatttaaaaaatctatacctgaacgtacacttaaaattgctgttaccatcacgcttttagcaactatctttgtattaagtatatcgtttattgtgagtgtgctaaatccacatacatcctatacgaccgtattatttgaagttatttcagcgttcggcactgtaggtttaagcatgaatttcacaactgactatggtactgtaactaaaatcattattattgtaacgatgcttattggtaaaattggcatcctcacttttgtgcaattatttattagtgaaaagaaacaattattccattatgcaaaagacaatgtacagttataaacaagcacatatccaattcaattggacatgtgcttgttctaatttatacctctaatttcattattgctccgaaatattgctgacatgttgtaaacgttataaaagcaataagttcactcatttctgcttcagtcaaatggtcgtttaaagtctgtaaaatataatcaggaatctccgttcctagtttcatataaacatcaacaaaaccaagacatatcatagatttttcatcagtaaattttcccgatggtttcccttttgctttacaatacgcgcatccgtgattttgagcaagcatgcttcttatttcttcttttaaatcgctagacagttggttatctgtttctagagattcacttaaattactccaacttaacatgatatctttgttatatccaagcaacttttgaaaaggcgtagtaccattttccgataattgaattaatgccattataatcactccttgattatccattattttatggcattattaactatattgaaatgctattttttaagtaaaaatagttaaatgctttattatttaaggagtttttataaatggacttaacaaatagaaaaattttacaaagtttaaatgaagatagtagcagatcattcagcgatattagtgaaattacaaatctttccatccccgctgttcgtgaacgcattaataaattgaaggattcaggaattataaagaactataccattgatattgattacagtgctttaggctatgatatagatatcatcattgaaatcgttattaaaaacaatttatataaagatttcaaaacctttattgcagaacagagccacgtcgcattttgttatcgtatatcaggagatagctgctttttatttaaagcaagatttaaaaccatgcaagatgtagaaacgtttatagatattttgcaaaaatatggccatacaaaaacacattttatattttcagaaacggtttgatatcaaacgttccttctttcaattactactttgaataaatatcaaaatgtgatgcaagtcgttcttttaacggataacactgataaaacaagatatttttatgaaaaatacggtttattttcaaatgataaatatcatactgttgcatttatgctatttagacatacgctttaagatctttatataaattaaaagagacacttcactattgtaatttaacaattaaatgaagtgtctttattaatctatttcattttcagtatttgaccgactttaatactattggaattcaatttgttatctgctttaattttatctacagtagtcttttgatttttagcaatactgtataatgtatcacctttttttacggtatatgttttaactaaatacagtgtttgacctttactaatgctatcagatttaagattattccactttttaatattatctacactgacgccacttctctttgaaatattatataacgtgtcaccagtgacaactgtatgagtatcgccggatatgtcgctattattacttggtgctttcaactttaatgtctgaccaactgataaggaattactcttcaagttattccaatttttaatattatcaatcgttacaccacttcttttagaaatactatacaatgtatcgcctttaaccactttataagtcgcacctgtaatagcgccattgttcccaccagagagtgctttataatgttttgaactaaactgtaaaactgattcatattgtatccccattgactaaaataaccaactggatcagagtgatctgtgccgccccaatattggctgatggcattgtgactaataattgtgcctgttccctgattattatctgcaagtgacggtgttaaaccattttcttttaacatttttgcagctaagtatgcctgattattaacagatttagcaaaatcatcaaacgtattagatcgtgttaattcaatttgataaaaatacggattggcatttgcaccagcaccccatgctaaatagttactcggcgcagtttgaataattttatcactgcttgcataggcatgcacgaacgcactattgtaattgttgtacatgtagttcacttcaccatcaatcgtactgcttggattggccgtttcatgaataactacgcctataaattttccagacttataattatatttaggtaaattattcattctagcatcttggacgatttgggctggctttatattattatttgcaatatatgtattgacgtcttggtatgctctattcgcaaacgtacgtgcttcaacagtattatgttctgctactttattatgtaattttaaatcttctggtgttaattggtccttcagcgcttgtgggctcatcttttgagctttttcaaaattaatcggcttacttgtattctctttttcatttttttctgttgtttgcttatgattgccttcttgcgcttgtgcgactgttgtacttaaaattaaactcgttgccaatactactgacaaactcaacctatatttcataaaatatctcctttgttttgaccatagccatattagaagtgccactgtatattcaaacacctatatttttagtttataatattatccaaacattcacaaaaatttttattattttatactacttattatttttggtgatttcactataaatttattttgaaaattaaaaaccaccatcttcaaagatggtggcttcattatatatcagtgaacacactagataatattgcgattaatgcaatgactaatacaaatacgagcaatgcatcaattcttttttgattacgacttttaggcggtttcctaaattcttttaatgccacaatacctgctactattacaagcactaaacaaatcaagtggaagattaatacaaacgtagccatgttcatcacccctaatatgatcaatataaattcaaacgcaagtgtttataattaagcattcatgaacttattaacttaaaagcataatgaatttcatcgtataaaggttagtctgcgcgtagtctttgtattaaaatacccctttcataacaatcagaaacgaaattctagaattcacttagcattagatcatctttctcttaagattgtctatggtcttttataacatctgccagttgttgctcagattcgtcatcactttcagctaaatgttccacaatcgttgtgtaatctttttcagatttattctgacttaatttatatgcagcttgtatgtcattcactttaattttgaaaccaacaatacccttgatttgttgtttggtattatccgacaaattattccaagttgcaccatcttctcgatgtgcctcgtatcgatctaatagttttgctaaatctgcctcaagcgcttcatgcgttaataactgtccttccccataaatatgaacactttgataatcccaagttgggacatcttcattttcataccatgtagatgagacatagccatgtggtccttggaaaatgactaaaattgacttattgttattcaatgttcgccattgctgattaccttttgccagatgtccagaaacatacagctgcttatcatcctcataaatattcactggcacatgtgtggcaacaggttgttccccatcaatcgaaacgactgtcgcaaaattatgtgcgttgataaaacgtttgatttcctcataatctttcatttcataatatttaggaatatacatcattcccacccctttaatcagtaaatacaataatgcaaaatttatatattggctaagccttgtacatcatggtgatatgctttagtcaactcacgacatgaagtgactttaccagactcattaaatttaaatatcgcatagacttcaatattgcctttcgaactatcttttttctctaccctaatatcatatcttaaaaatatagtttgttgttgttcgtctatcaacatatctttaaattgctctattgttaaagtctttaccacttcttttaatttttgaagatgcaacttaaattccgttaaatttaacgtatcatgatctgtttcttgtatatactcagctgcaaaataatgatctattttttcagtatccaaattaatcaggatatcttggtataaattttcaatttgtgtttttaataattgcttatccaacatatgtctcatgcctccatcttttattattgaaaaggaatttttcaaagtttttgtatggtcgttattttaaaatctgaagcgtactttaatccataaccaagcgttcgatccatacttatatgcgtgaaccaaataagtgcaatttgcattaaaacaggctctttaacccataagtataatattgttactaaggttggcaacacgtacgtatatcccatattatagaccatgctacctatccgtttattaaatacatagccaatggcagttaaatctggcgctaataaaaatattaaaaagagccaaaaagaaaaatcaaacataaaatataaactaatgactagaattaaaacaaaggcattttccacttttattaaattgcgcatgtaacatctcctaatcataaaaactgaagcgtatcgatttataattatagtttatggcaacaactaaagatatacaactatgtataatctttaataaatttacataaaatttatatatgacttacaatgttatcacttgagtaatgcattgtttattacattatttttttgtgttttacttgttttatcggaggtgaaatatcttagatcatgataacaatcaaaacgtactttcatcattaaattattttagtgtattttttgcgccaatcttatttcctataattgtttggatattcactcaaaaaccagtaaccacacatgtcaaaaaggcactattaaaccatataggtgtggcaattttttattttttaagtagtatcgactttatattttctaaagaagtctatgagaaaccctttgataaccccatgacgatttcctatacctctatcgcgctaggtttactttttgcagttatcgtcgttatgctatttatctttaatttaattcgaggtatcaagcttttatcaaaataattactaagcatccaaataaatatatcaaaaataaatttcataggagttcctattatgacccgttctaaaaaattcatcattatgatcactacagtcattgttatcattgcattcatcttccttgctttatttgcttggaaaatttatgctgaacgcaattataataacactaatatacgagaggctgctcaattcaatcctttgattagagaaactgactattatgtacaagtaagtaatccacttaagaaaaatggtaaaaatcaagtcggagcatatacttatatgaccgatggtttcgataaagatggagtaggtcatacagttacttttaacggaatgaaaaaactaaaaaaagagcttatttaaaggtctctttattcttaggagaagcgaaatcatacaatgaaatctctaaagataaagttcctcataagccattaaaaaaactagaaatgcaacagtaataataaaatgaggttatcaatcctgcttggtttttatataattgatgtaatcgtcgcaactatttttctaataattctcatgtgaaatcctctttgcttgaatttattattcaaattaacccatccattattgaattaaaaaattatccaaaaatgatgtataccagtactatgataaaaagaatgttatatatgattttcttaatatttttttcttcgatatgtggtactgaatctattatcaagctcagtacaatgagtacgccagaaaatttaacgatatagtctaagaactgccaatcaaatatgatagctagtactaatgaacctaatgttaagactaaagctactatccctgctgtattggcaatagatgctaatgttttatatcgttcctgttcattatctttagtcatactatctccccttaaaaacatagttcgcaacttaattatatgttaacataaattctattgaacatgtattgtgtataaaaacacccatcaacacttagagttaatgggtcatatttatactatttatcttttttgaaattttctacaaaagtttttttaatatcctcaatcaatgatctgctaccgattaaattagatatgacgctcataataaaggttattatttttccaatgatatccatatagcacgctcccttactatataaataccatattatccacaatataatcatatttatataatagattttaaaaacataattatattctttgagatattgctatatagataaaaagtattacttttcatctcgttcacaataaataatttttatgctacgcttacaaaaaagaagctttgctatgagtttaccagtcgctattgtcttaggtatcatgtttgtacctatctacgctttttttgggtgtttatattccgatgggaaaataacagaagagttaaacgtaacaatttcgaaccaatgactaagaaatcattctatgttcttttgttagttcatgcagtatccgctattcttatggtgatttctgcaatttatataagttattttagttaaattaaaatgacatacataaaaaggagttttaatttggatatactcatcggattacttattaaaacaatagatattattgtgagcatagttagcattttcgaacgaaaaacatcaaagctattgagtaaattgtctaaaagtaaagataagacaaaggggtaaaatttaaggagggtttaaaatgaataaagcaataattgcccatcacacgcttaatattgtattaatgatcattctaataatagtaaatcattttaatgttttaagcttaccagtttcaattatactagccatttcaattacaattaatgcagctttattaatcagagcaaacagaaagaaaattgaaaatgatggcgttactatagatgactataagaaaaaataatataacttagattggagagatatcatgaaacataaaagtactatgccgaattctaaattgatgacaactacattcccaattaccgttttattacatttattcttcattgttctatcgatttataatatattcattaaagatagtacaatcgctatatcgctctctatatttagtttaatcattttcacttctatgttaacacttacaattaatgcatatataaactacaaaagacaaaataattggattggagaaatcacatgaaggttggtagttacaaaattgatgagttttatctaatcatgattggtggatttttagtaactcctatttttgtaccattcatgctaatttcagtagtcataatggttattattgggttagagaaagaagaagattaatagttaaaaattgttttcatttaaattctttgcatcatatttttcatacctttcccagttctcaaaccaaaaaaataaccccgtaggtatatgcctacggggttttcagatacaatatctattattgttcttctttaacatatggtaataatgccatatgacgagaacgtttaatagctaatgtcaacatacgttgatatttagctgaagtacctgttacacgacgtggtaaaattttaccacgttctgagataaaacgttttaataattctgtatctttatagtcgatgtgtgtaattccgtttgctgtgaaataacaaacttttttacgacgacgtccgcctcttcttggtccacctgccatggtaactgcctccttttaagaaattttcatttttatatgttctatataattagaatggtaagtcatcatcactaatatcaattggtccgtttgcatttgcaaatgggttatcagattgattattgtttgatgaattattgttgttattactttgataagatgacgtattttgtcctgattgttgtccgccaaagttttggaaattattgatatttccttcttgaccatgacgttggttttgatttttaggttcaaggaattgaacactatcacaaactacttcagtcacaaatatacgacgaccttcttggttttcatagctacgtgattgaatgcgaccgtcaacgccagctaaactacctttaaataagtagttgttaacattctctgcttgttttctaaaaacgacacagttaatgaaatccgcttcgcgttccccttgcgcatttgtaaacgtacgatttactgctagagtaaaagtcgcaacactcacgcctgagggtgttgttctatattctggatctttagttaaacgaccgactaaaacaactctatttatcatttaagcgacccccatctattattttctagttttatcttcgtcttcacgaattacgatataacggattacatcgtcagaaattttagctaaacgttggaattcgtcagtagcttcgttatcagctgtttggatacgtacgatattgtagtaaccttcactgaaatcgttaatttcataagctaaacggcgtttaccccagtctttagcttctaaaacttctgaaccgtgagaagctaaaattccgttgaaacgttcaacgactgcttttttagcatcttcttcgatattcggacgaacgatgtacataacttcatatgttctcattgtataattgcacctccttgtggtctatgcggctcatcatcaaatgtgataagcaaggaataattttcattactcacaatcaagaattatagcacatgcctttacattttacaatgggtttaccacgttatagcacgttaaatttcatagttgtttcatatgaaacattatgacatatagccattcatgatatctaccaaagcattcaagttaaataaacatgacatcttctacgattatattttcaaattaaatcattattcaaatactaattaatatcaataaaatttaaatatattttaagttaaggttgaaaagtatatttaattctaatagcatatcatctatattattttttgatgtcatatttactatttttcaaaataaatttcaataatctacatagataaaggggatgcttatgttttcaaaattcaaaaaaggcttacttgcaggaagtatattttttgcatcaacagtcattatcaatacaacttacgcctccgataacccttctaaccaaaaaggtacaatgggttatggctatcaacaatatttagaaaagcatccagataaagcctctcaacaaaaacaagaaagtggctctaaatccatgcaagccgaatctggaacaacgcaatctggtgaacgtgtgttggatatttctgaatggcaaggtgagttaacgacacaagaagtcaaagacttaaaagagaattatgatttcattattataagagctcaatatggctcagaaaaagtggatgctgcattagagcacaattctgctttattagataaaaacggtttagactttggtgtatattcctatagtatgtatgaaaatcctgacgacgcaagatacgaggcgcagacactttacaatcgtgctccaaaagcgagtttctatatcaacgattttgaagaaaatactgtaacttctggtacgcctgaagaaagcacagacgcttggtatgatgaaatgaaaggattagctggcgataaaaaagtattattttattcttatgaaaatttcatggtagaaaatgcttctaattctgtaggtcaatatgatggttactggttggcaaattataatccaggtcaacctacacgtgaacacgtcctctggcaatatacagatagctatgcatctcctgaattaaatcaagatgttgatgcaaattatgtaggacctggtgttgaaacatcttggttcacttcgtaaaaattttaaccttgatgttattttaaaagtgcgttttctttatcaacgctgtacttctatttttaacatctcaaattgaagcacaccgcatgtcactaacattaatatatagattagaaaaaacccctcattactcgttgtaatgaggggttgctttgtatcttatacattaaatctaaagtgtacaacgtctccgtctttcataatatattctttaccttctaggcgttgttttcctgcttctttagcgccattctcaccatcgaatgccacgtaatcgtcatagctcgttacttcggcacgaataaaacctcgctcaaagtctgtatgaatgatacccgcacattgtggtgctgtcatgcctttaataaacgtccaagcgcgcacttcttgtacaccggctgtaaagtatgttgccaaacctagcaagtcataagttgtacggattaaacgatctaaacctggctcttcaatgcctaagtcctctaagaacatttcgcgatcttcatcttctaagacagcaatctcttcttcaatttttgcgctaatgacaatcacttctgaatcttcttttgctgcatattcacgaatcagttttactttttcattatcgtcatcgccgatttcatcttcaccgacgttagcaatataaagcatttttttagatgttaacaactgcgcttggtcgatgaatttttgatcttcttctgtgaattccagacttcttactggattgccttcttctaaagcttctttaattcttgataaaatacgtgtttcattaaccgcatctttatctttttggcgagccattttttccacttttggtaaacgtttgtcaacagattctaaatccgctaacaccaattccatgttaatgacttcaatgtcatcaattggatctacacgacctgaaacatgcgttacattatcatcgtcaaatgcacgaacgacttggcaaatcgcatctacttcacgaatgtgagataggaatttgttacctagcccttcaccttttgaagcgcctttaacaatacctgcaatatccgtaaattcaaatgttgttggaattgtctttttaggttgtaccatcttcgttaaaacatctaatctgctatctggcacttcgacaatccctacgttcggatctatcgtagcgaacggatagtttgctgctaaagcacctgcttttgtaattgcattgaaaagtgtcgatttacctacgttgggcaatccaacaatacctgctgttaaagccattattcattctccttattatcagtatcttgttgggatactagtatttttttaatttttttattaaaagtttgtcttggaatcatgatacttctttgacaattttcacattttattcggatgtcagcacctacacgaatgattttaaaacgattcgtgccacatgcgtgttgttttttcatttctacaatatcatttaaaccgtaattggatgtcattctgtaacacctccgaccgtcttaatcattatttttgctggttcgcatcgtactgtaccatcgttggctgtggtgttttaatttctttaagtttaaataatttcaagatttcttttcttaaaatacgcccacctgacgcaccttcgcctggaattgtctctgcagacacactcaatacgatttcgttatttgtaatcgaattaacacctactacttctggtgtcgagataaataagtaatatttagatctaatagattcaaaatatgtcgtcagtacttcttccacatgatcaatgtcttctgaaatagatactggaatttcaacaattgcctcaccatttataactgaataattggtaatttccccaacactcccattcggtagcgttgttaattcacctgtaatggtattaatgcgcattgatcttaaaccaatcgatttcactgtgccttctgccacggaagaaccactattactaattttaacataatccccaacatcaaactgattttcgaaaataatgaagaaacctgtaataatatctttaacaacagtttgagcaccaaaacctactgcaagaccaacgacacccgcactggcaataatgccacctacgcttataccgaatttacttaaaatggtcgtcagtactataaaccataccacataggatactacattttgaactaatgatatcaaagttttcgaacgctttttattcccacttttgcctttattttgaaatttaaagaactgcgcaatcgctttattcacaaagcgcaaaataatccatgccgcgacaacgtatacaataatcataatcagattagatagtaaagcttgatacgtttccggctttgttaaaggttctataattgaatataggatacttttaatttgacccaaccatattccctcctaatataagtctctttatcactgtattatactcattttagcaatgaaacaaatccaacttgcgctttagtatacaaaaatgaacaagtggacgcattgcttatgcttatataaagtttaaccttttctagtttattaaaaatataggctttagcaaagtattttagcaatgctagatacattttttaatttttatacttaaaaaaagacaaaagaaaaagaaccataattaaaaattatgattctttaacacccaattagtgatattactatattaaacctatataattcaagtctttttaattaatttataactcctataagatttaaacgcattcattcaaatatcctgaggactacattaattttattatatttaatgacccgcactcatgaactgaaataatcaaattaaatataattgaattttaataaatatataatattaatattctagcattatttttatacatctaggaattttgttacaaaaaaatattaaattgttataatattcaaataaaggaggtgtgtcgtatgctagctaacttagtagaacaaactctttctttaatcctagaccaaattgaataacgcacaagttgtcacgtacaatttatgaaggaggggtattaatgattgaaaacattattgaactcattttcaagtcgcttttaaaataatttgagcactgctttacatgaatcctttcgttgtcgttgttgtgcaccaaacctaaactacatacatgatgagcgtcctttacgcatgttaagaacacaaactcaaactgtatttagtttacaacctaataattgattttgagcacgatttgagcacgattgttatatcttaataaaagaatcttaattaaagattatgatgctttaacacccaaatttatatgataagtaattactttaatgtattgcactttctaacatttatgagtaatgaaccaagcgcacatactgtcccttacaacggtatgtgcgtgttttttatcttatattacttatactgtctctgcagccctttaaaattgaaaatactgataatacaaatgcctttgctgattacccgacgccatgcgcattccatgtaaaaaacacacatcatttatcctcatatttcaataaatgacatgtgtattttcggtttcatgtttgtttccattattcaataatttgtttttctaaatcattatgcaatttaaaaatgataattctttcacctgttctagaacttaaatctgtatgaaaacttttcactttttcgcctgttatagacagcacgatttcatcaagcgcttcaataccagattcaaccagtttagaacgtgttttttttatagttaacaaaccttcattcgtttcacacactttgtactctgcttgagtcaatacgccgtgtaaactcacaataatcatgtcacgtaatatatccgttttaactgacagagagccgcggccaaggaagtctttttcccattgggtaattgctttgctgatttcagactcatagcgacctttggtcattttcataaaatatgcatctcctgtagaactaaaattagaaattcattttaacaaagataacagtaccattttttaatcactttctccatagttctgtcatattccctaggaaataacattggttgtcatacgttaacaaatgctatgatccatcatgctcagttcgcattaactaaattttttaacttcgtttgaccattcatgccagtgattgtcttcgtcaacacttgctaaacgaacccaaccatgcatgactttctgcttaaatgtttcatcattttctaataaccgactaataaaggcttgtggtgcttggattacaacaactaatctaatcggcgaatgatacatcttattatctgctgacatcacggattgccatggtaaaccggtcaataaatcacttgcattaccttgcatcacgccgatacctgcagtcactgattgtgttgttttactaccacttccgtaatagtgcggcgcaaccgtagatgcgtaatattgtaagttaatccattgcgctacaagtgctggacccgcaataatattttctaaaatagtgccattttcatcgtttttccaattataattatgcaaaaatgctcttcctgctaaatcactctgtttagttaattcacgctgaccaatgataaacgctgcatttttagctagaccccattctggtctaatttcactccaatcattcgttaatcgatacacttcatgattcggattgcgattagttaaattattattcggcaattgagagaggcgttttttatttgcttgataactaatttttggcatggccgcttcaatattttcatatgcattacgtgccgcttctgtaagttcaggtacgtaaatccatgtcaatgtatcaatagaagtttgatgttctgcagcagcgaagattgtcgtctcaggaatagctacaccttcttgcaacaaaccttgtctcacttctggcaaattacataactgcgccaatacttttgcattaaaaccactcgccgcaccaccacatgcaccacaatctaatgacgctgcatagggattattggcactctgacttccatgtccacacatgacaactaacggtgcgaaatcgtctgttaagtccattagtttaagtgcttgtagagcgtagttcactttttcttcatctgtaaaaccaaccggcaaatcatcttccaaatgtatgtggcgatgattgtgctgatgttgtggttcataatttaaagtcaatgcagtatcattgggtttctttaaccaacttgtataaaattttcgaataacactgccaacacttttcggtataaaactacgtgtaaacatttgtagcgataaccacggaccacttaattctggtaatagtaagctaggcaagacattttgtttcatttttttaaatgtatacgtcactgattctaatgcatgtttacgttgttggaatgcattaggctcgtgctcatgagtatattctttaattttatgctgtggctggttcattacaggtaatgatggatgactatactttttacccagttccgctttttcgattggtaaaccgaaaaatccagctataccaatagtttcaaatggaccattagcttcaatgtgcttcctaaacggttcagaacgcacatcaatacaaaatgccatttgtactaatgtttgtgattgttgttcatcctcaacgcttgatttcggtccgatcattgctttcaattgttgattataagtagcttcccaagcgtctaaccataattttctacaaaattgttcattgaatcgatacgcaaattgaatatgtgcttgttgtgcttcgatagatagagctttccaagattgaattgaaaaattgccccactggatccatgatgcaatcagctcttctttattcatatcatttaaatcttcaggctgtgatacaggcaaatatggctcaacaattgcccattccatagcaatacggatagcaagataagaaaaaagtaagtcatgcactttgtgattatgttcatcttgccatagcatcatgccagcccaaccaggtaaagatagtaagtgattttctaaatatgtttgcgcgtctgcctctgagatatttaaatagcttaatgcttgttgcattaaatcctctgcctcattaggtaatgattttaaacgtgcgcgttgatctttggttaacgcaggatcatacgctactaatctacgccaagcatagaataatcccttgtcacgatttggcattgtccatccagattgtgcatcatcaatatataatttacaccacttaatcgtatggtaatccaccgtatcaatcagtcgttcatttttttcatctaaaatgtaggtactctttaacggtacagtattttcagattcaaatttgacctgttcatttaaatcactagctaacgcttctagctgcgatttaatatccgtaggtgtttccaacgtctccaatttcaatgcgttacggccatattgcgctgcattttctcttggaatctttaatgctgtatcatttaaccattgttgaaaaaattgttctacatacgcatcatcaatttcgcctttttgattggcttccaaaatggtcattcgtgcaggatacatatctactttgcgcgtttcttttagccaatgggcaatttcatcaaatgatttatgttctagccttgcccacggacttctagcagcgaacactgaaataggtgacaatggtacgattacgttactcgcacgtgtaactttatcatgtatatcatcaatatatgtcgacgcttgcgttgattctatctttgatacgcccattttaatgccctcctttagataaatatgatttcaaataattagggtgtcgttctactgattcaagtttcgcatcacctaagcgtacaatccacatgtataatatcgagaatgcttttgacgaacgattacgtgctacccaagtactcatcaaactaccaaatagcaataatactgcaactatcactactgcaaacattggtggttgtgcgctatggaatgtgattgtatgtaaagcaccactgaaaaagtgatgtacaatataatagactgcaccaaccacaatgagtacaaacaagcccatcatgcgaccaaatcgaccttctccaaacgcaacaagttgtgtccatgatactgataacgaccatgctaaaatcaaaccacttactagtcgataaccctgttctggcgctgataaccaaaagcctaacccgattgcgattgcaagacctcgaccaattagaatccatagataagacatgcgttcattaactcggcttggaacgttaaaatgacgcaccgctgaaccagaacgtaagaataacgtcgctttaaacaaaccgtgcaatattaagtgaatgattgcaggaatgtaggcacctaatgcacactgaattaacataaagcccatttgaccaatcgttgatccaacaagtaatcgtttataatcaacatgcactaaactgatacccgcaccaattaaaacagatacacttgcaaacacaagtaagaccatcgttgcgatgtcaccattaaatagtggtgaaaaacgtgtcagcataataccacccgcattaacaattcccgcgtgcatgattgctgataccggtgtaggtgctgctacagattcaatcaaccatctttggaatggccactgtgcagctggtaccataaccgctaatataattaatatattgattccaaattttgaccaagcattgatctgcgctaaattactctctgtaaatatagcagtgtaatgccattctcctgttattaagccgatccaaacaacagcgattgctaaagctatccaacctaagaagaacaacttacctgtcacaattgctgcggctctagtaactctccaagcactcgtcaaactaattaaaagtgttagccctattaaagtacaaccccagcttataaccattatgcggatgtcaccagctaaccatgccattgccgcaaaacttgtcgtcaatgtaaataacatgaaatattttcgatagcttctatctcctgctaaatatcgtatacaatagcgttgaataattaatccaataaataaaacaaaaaatgccattaaccaagctaaaatatctaaataccacaaaccagcttcaacctgatttgaagtaaataggagtccgataaatgctagcaacggtggtaaagcaacgatacaaatatgtatgcgcacataagcaactggaatacgtttatttaaaaatataattccgctcagtgcagcaataataatggtgatgaaaaagatagttaacagtatagatgcattaaacgatgtaagcatttcagattctcctttgtaagatataatgtagtgcagactacttaattacatgataggttgcgtagcacaccacaaaaaagccgacaatatataataaaccctgaacgattcattaccattgccggcttcataacaacgcacttttttaaatctaaagtgttttgctttgctacctaatatataatttcatgtttttaaatttaacaataaaagttttacttcacgcaatatgtcgtatgatttgaacttttaactcttattcgtccactttttcaatttgccaatatttctattaacatcttgctaaagccgtaatatcaattaaagcgcgtccttcaacgactatatttatttttatttaatattactaatatataatcattattcgtcattgtcaagaatagctatattcattcatactgataataagtggaaaatacataaaataatagaaacaaataactttttttaatataatcaatatatatttatccgattattattatcgactattcttgtattacgaatgataactttacctatgacgcatttggaggtgtaaacatggagcatgctcaagataaaatcactatgcgtgtgattttacttgcagggaaaatattattatcttcaggcgcggagatttctcgtatagaagatacaatgaaacgaatcgcacaatgtatgggctaccataatagtcagggttatgtgattaatattttcatcaatttttccctaagtgaaaatcatgatacacgcattatcaggatcaacaaaaataccacaaacttgttaaaaatatttcaagtcaattctatttcacgtcagttagccagtaatcaaatttcaattacccaggccttcgatcgccctaatcatattgaacaagcgacacttagtattaaattgtggaagaagtgtttagctgcaggtgtgatatcactcagttttttatatttacagggcgggaattttcaaaatattgtgattacatttattgctgggttccttggttttctaatcgttgaatgtatgcaaagtaaatctacgaccatgttcataccagaattcgttgcatctttcgttattggcgtcattgtcctgctaggtagtcaactattcaacattcatcaaacgataggaccatccttgattgcttctattatgccgattgtgccaggtgtcttaattaccacagccattcaagacttatttagcagacacatgttaatatttacagccaaatttttagaagcgctcgttatcgcattcgctataggatctggcatttctattgcttatttactattttaggaggcgtatatcatgaccttaatctatgcattcttgtttagctttactgcctcttactttttcgcagtaatatatgatgcgcctaaaaatttattctttgctgctggattagcaggtgcatcaggatatcttattagttttatattaaatgacctattacaaattgatagtatctattctagtttgcttggcagtttaactttaggtgtgatgagtcatatcatgagtcgaatccttaaatctcctgtagtcatttttatgattcccggtatcatccctttagtgcctggtagtttagcctataaagcgatgcaacaattggtaacattaaactttactgaagctaacaatacgtttattagaactatccttatcgcgggatccatcgccttaggcttactgctgtctgatcaattatcaaaaacattgaatattaaaaaatactggaaagtaaaacgcaatcgattataatacgtgaaaaatccccttgctatttgaaatagcaaggggcaaaacgtatgacggtataattgataatgttgcattgtaatttttctatatttagttaaaaattcaagttatactattcgttctgactatcatatgtctttttaaatcctgattattctaaacctggctatcaatgcagatcgcaataaagtttaaaataatatgagcgtaaggtataaaccgacaagtgttacaaataatactggaatcgtaattataatacctgttttaaaatacgttccccatgaaattttgacccctttttgagtcaatacatgcaaccaaagcaatgttgccaacgaaccgattggtgtgattttaggacctaaatctgacccaatcacattggcgtagatcataccttctttaattatccctgttacattggactggccaatcgcaatagcatcaataagtacggtcggtaaattattcatgactgatgatagaaatgcggctataaagcccatgcctagaacgctactaaacaggccatagtttgaaatattagataaagtatcagctaaaatggttgtaatacccacattcttcaatccaaatactactaaatacataccaatagaaaataacacgatattccatggtgcgcctttaataacttgcttcctatgtacagcatgtgatttgcgagccaacaatacaaagattaaagcaaccatacctgcgacaatcgatacaggtatttgaacaaattcacttataagataacctacgagtaaaattgctaatacaatccacgatattttaaataatttttcatctttaatcgcatttttaggtgtttggagattttctgtatgaaacgttttaggtattgattttctgaaatatatccaaagcactacaatactcgcgacgagcgcgaatagattaggaatcatcattcgacttaagtattcaacaaagccaatatcaaaataatctgccgaaacaatattaactaaattacttacaataaatggcaatgacgttgtatctgcgatgaatccacttgcaataataaatggaaatatcacttttttattaaaacctagatttcgcaccatagcgagtacaattggcgttaagattaatgctgcgccatcattagcaaaaaatgctgcaaccactgcaccaagtaacataataaacacaaacattttcaacccattacctttagaagccctcaccatatgtatcgctgaccattcaaaaaatccaatttcatctaatattaatgaaataaggataaccgccacaaatgttaatgtggcattccatacaatacctgttacttctaacacatctgaaaaacgaacaacccctgtaattaatgcaaggatagcaccgactagtgctgtaataccgatatctaatcctttaggttgccagataacaaacgttaacgttaataaaaaaatgacaattgccaaaatagtcatcattaacattcacctgatttcatatttttacatacacattcttgattagacgtgtgaatcacgtttaaattttgctgaattgattctaataatgtgtggttaagttggtacatatgtttattgcccactttacgtgtcgtaactaagtcattcgctaccaataatttcatatggtgacttaatgtaggctgagaaaattgaaagtgttctaataaatcacacgcacatagttcaccacaagaaagtaaatctaatatttctaatctacttggatctgacaagatttttaacatagatgacaatactttataagacattatatacctcctagacaatacatagactaacatctatatatattggtgtctatattgtgttgattatctctataaaaatcacttatttgcttatcttaactatcatataaaaaattagtttcttatgcagaaactttgtttctttatgttgatatataagcaatataccttattaaaaatttctagtaacattaaatacgagaggtgttaataatgattcaaatatctaaaacaataaaaaaagaacgcttaagacttggtatgacccaagaagcattgtctgaatatcttaatacaaccaaaactactatttctaagtgggaaagcgaaatactttatcccgatattacgatacttcccaaattagcaaaattatttaatatttcagtagatgatttacttaattatagtatcactatgacagatgaagaaattaaaaagatctctatatctctttctaaaatggttaatcacacgagttattctgaatacctattttctgttagagactattatcttaattattgtgatgaatttaaatttcttaattcattgttaggcattttagcaaataatattttatattgtgagaatgaaacacaaataaaagaaactaccgccttagcgcatgaaataatcaaaattacagaagataattcaaactctatttacttaaaaagacatgcacaaggatatcaaactttaatgtatatgtttgaaggtgattactcagcagttatagaaaatacgccagattttgatttaaaaattggtgaaaatgcaacattaacattagcttatttacaaaatggaaaccaaacaaaagctaaaaatgtaattcaaacagatatgtatcagtctttaatgatttatatgcatgatttcgctttaatgcttatctatgatttacatactgttccaatagaatcattagaatcaaaactttatcatttaaatcaagcatttaatgtagattatttatatccccatctaagtattaattgctatcataaattagctttatattatataaaaaaagatactgatatagctattaattatttggaaaaatattgccaatgctttgattacttagttgttgattttgtatatcaaaaagatgaattttttgaaggcattgatgaatggctaaatacattacccctagaaggacgactacctgccaattatgaaaacacattgaatattatctgtgcaagaatcttggaaaacgaaaattttgttactttagataattttggatatataaaaaagaaaccacttagaatttataacaaaaaggatgaaggataattgatacacaaaaaaggtctatagaaaatatgctctctttactttctttatcccatttacgctttttcttgttgttgaacatcataaaaacctctttcagtaattgaattttgtgatactaacgtttcatgcttcgtatcactttcaatgcttacgtgaaacaaacgacatcataaaatgctattcaactgctttagggtttacaccatattgatttgtttctttttgaccgcttgtacaacaaactgctaatgaaacaattaaaatcacaatgtacacgactccaaaaataacagcaataactgttaatgcagaattatcgagtgttggaatatctgaatttataaattcactaaaatcattaataaccgcaattagaaaaatgataatgggtattagcatcgtcataccaacatcgtgaaaccttctaactgtaacagtgaacatagcgactaggattaatatatacacaatccaaccaacagtatcttctattattgctggaattggtaataagaaaaaaatgatttcaagcattatattaattaggatattcattaaaaaaggataccaaaattccttacgcctcgctctacctttgatattaagtgcattgatccaaaataatttgtaataatgtatcatcccattgctcccttaattatgatttgaataaataaactgactacttgcttcacttaaaccataacacgataacacaacaaaaaacataattaatctcatgtttttattaattaatttattataatcacatatcacaagccacttttactatagtcctatattttctttttcatctttattattatatattaattattcaaaaaatacttattgtagtattttaaaatattgtgacacatgttatgcttttgaaaacgctataaataggaggcactatacatatggaatcatctaatttacctttagcgcaacatttttctagtttacgtgaaaaacccacttggggtttaaaacttattattgcaatcgttatcgtcgcgttatcagctacgattgttgcattaactacggacttcaaacaaaatttcgaagatgctggattaagtggacaacagcttgaccaatcacttgaattcgcaaaaattatcggtgttgttagtggtgtgattggctctatccttacgattggtgttacttttgtaatcattttaattatctctaaaatcatgaaatcagatgctagtgctaaatctattttttctgcaactttaagttatacgattattaccagtaccatcgcactcattgttgttcttatacaatggattgcaggactatcagtcacagattattcaattaccagcctaaatatctttgataagggtaatcctatacttcgcgtgtttgacttacaaacgcttatcagtgcttatgttttaggaatcttgttttttgcaacaagtcgtttctctaagaaatcgtcctttatttggtctattgtttatcttgtcgtagttatcggtttctcactcttaggcgctgccttccaataatttttaaccatagaaacatcaaatcccctcactacaattgtagtgaagggattttttagtatcatagattatttattttgttctgcttctcttaattcaatacgtctaattttacctgagtttgtcttaggtaagtcttcaacaaattcgatagcacgtggatatttataaggtgctacatcttgtttcacataattttgtaatgtcttaaccgtttcatccgttgctggcacatcatcttgtaaaatcacgaatgctttgacgatattacctctgatttcatgtggactcgcaacgactgcgcattctttcacatattcgtgttttgtcagagaatcttccacttcgaatggcccaatcgtataaccagaactgatgataatatcatctttacgtccctcaaaccagaagtaaccatctgcatctaatttagctaagtcacctgtaatataatattcaccttttctaggttccgctgtacgttccggatctttatagtaacctttgaacagtgcaggtaagtctaacggcactgcaatattacctacttcacctacttcggcaagttcaccttcatcattgattactgtaacatgactgccaggaattgctttgcccatagaaccaggacgactttctgtatcttttaagaacccaattaataatgtactttctgtttgtccataaccatctctcactgtaaggttgaaacgattttggaatttttcaacgacttctctattaagtggttctcctgctgacactgcgctatgcaaatgttctaaattataatcagtcagattaggtaacttcgccatcaagcgatattctgttggtgtacagcaaagtacattaatttgataattttgcagtaattctaaatatttttctgcattaaacttgccgttataaacaaaagccgttgcacctgaacccataatagataagaaaggactccatacccatttttgccagcctggtgcagcagttgcccaaacaacatcatcttctttaatacttaaccaatgtttcggcgccatttgcatatgtgcatagccccaaccgtgtgaatgaacaaccgctttaggattacccgtagttccagaagtatatgacagtaaggcgatatcatctctagacgtctcaacagtgtttaattgatctgaaactgttgttttttcatcttcaacagcataccaatccgcttcttgaccgccgacaataaatttcgtaagcgatgcgtattcttttaccgctttaaattcatctatactatctgaagttacgacgatggccttcacttcgccatgcgtaattctatattgtaagtctttagtacgtaacatttctgaactaggaataataacgaggcctaatttcaatgctgcgagataaatttcatatgtttcaatgcaacgcggcatcatcaccaagactttgtcacctttttgtagtccatgttttaaaaacatatttccgactttattagcgtgcttaattaattgtttatatgtgatttcttttgtttcgccacccgcgtcttcaaaaatcactgctttcttcattgcatcagtcgcaaatttttcaatttcgctgacaatattatattgctcaggggcgattaaatcttttttatccattgtctattaactctccttcggttctatatctatattgattaaaaactcctaatatttcatttaaatattctagtccattgtcatcataattttattatctttgcatgtaaaaaaatatgattacggctactcagtaatgaatactttcctattataatacaactacaactaattttgaaaatattctgaattttaaaagtaatgtcatgcctgatgtgccaactaaaatctctgaatgataactttgacatttgcctcacatctcatgtagtatttttaacatacagttgtaaaatgttattgtgcattttctaatcattattcacacaaatatcaatcattacttacctaaagaactaccttttaaaccgcctttttaaaaactatttcattcctgtctcgttctgtttgactacaaatttaatttttccagttcaacttttagatttaaattttgtatagcgctataatataatactgtttaatttttatgaaagaagtgagttaattgagtgcaagcgatactttccatgtcgaaaaaagaatccccttatttatcgtactactatcaggggcctttattacttattttaaaccaaacgttacttggtacggctttaccgccaattatgaaagatcttcaagtatctgaaagtaccgtacaatggttacaatccatatttatgttagtaaacggaataatgattcctattacagcatttttaattgaacgttatacatcgaggcagttattcttaactgcaatgagtatttttgctttaggtacattgctttgtgcagtgggcgtagatttttcaatgcttctgattggtcgtgtcctacaagcagcaggtgctggtattatgatgccacttatgcaaacaatcttattcctaactttccctaaagaaaaacgtgggactgctatgggtctcttcggactcgtcatcgcatttgcgccagcaattggaccaacattatcaggtgttttagttgaacatcttacttggagaagtgtcttctacgttgtgttccctatcgcaattattataattattgcttcaattttcctattgaaaaacgttaccgaaacatcacatccaaaactggatatcacatctgtaattctatctacattaggtttcggtggactcctttacagctttagttcagtcggcgaagctggatggggcagtgttcaattcattgcaccactcatcattggcattgtttcattagttgttttcattcgtcgtcaattgaaactaaaagaacctatgcttgagtttagagtctttagttataatatttacactttaggtacagcattaagtatgtttgtctttggtgtattaatcgcatctaacattatcttgccgttatatatgcagaatatgttacagttctctgctttagagtctggtctcgtattattgcctggcgctattattatgggtatcatgaacccaattacaggttatatattcgataagttcggaggtaaatggcttgcacgtattggactactcattttagttctatccacattaccatttacagtattaacggcgcacacgtcgtttacttatcttgctacatcgaatgccgttcgtatggtgtcgctcgctatggtaatgatgccgatgacaactttagcaatcaatcaattgccaaatcaccttatcgcacatggtactgcaatgaacaatacatttagacaaatggctggggcaattggtacagcattatttattacattgatgtctgtttcatcaaaccctagtgatggtattgaaggtatcatccatggcgttaacgttacatttatggttgcagcagcaatttcatttgtagcattgatattatcagccaaattatctgatgatagcaaaccttcacgcagaacaatgtagtctatgtgttaggttaatggttattaaataattaaaaaaagcacttacgatgtattctatcatgcatttcgtaagtgcttttttttatctcaattcttattcactgattatttattaaaatcaatcagtagctgtcagtctattaattgctatttccccaagcgatttggcagctacaattaatgcatcctcattcacttcaaatttaggatgatggttcatatatggtgacgccaactgttctggtttacaacccacaatatagaaggtacccggaatctcttttaaataatatgcaaagtcctcagatcctgatacagcaggtatttctacaagctgttcaaaataatcgcctttacttgcagataatatatcaacaacatgattggtttgtgttggatgattataaagtacaggatatccaaattggtaatccaaatcatatgtgatatcaaatccgacagcgacactttgagcaactttctcaatttcttcatacataaattgttctaaatcatcattttgataacgtgcagtccctttaattgtaactttatcttgaatgacattcgcaccacctggcgcttcaaaagctcctaccgttatgactcccatttctgatggatcaatacgtcttgatacgattgtttgaagcgtatttacaaagtttgttcccgcaactaatgcatcatgtgtcttgtgcgggctagcagcatgaccacccaatcctttgattgttagtgtgaaagtggaactacccgcaaatgcattgcctttattgaaaccaatcacttctggtcctgccacgggcacaacatgaataccataaatttcatccacatcattgagtgcaccagatgccatgatttgttgcgcccctcctggaggcatttcctctgcatgttagtgaatgattttgattgtgcctgaaagttggtctttgatgtcaatcagcgcatccgctaatcctaataaataggcagtatgtgcgtcatgtccacatgcgtgcatcacgccttggtttaacgatttgaatgggacgtccgcttcttcttcaattggtaacgcatcaaaatcagcacgcaacccaattgtcttacccggatatcggcctgttatctcaacaataattgcattactaccctcaacgggttgtgttattgtgacatctttatttttgtaaaaatcttgaatataagcagcggtttccgtttcttgaaaagataattctggatgttgatgtaaataacgacgatgctgcaccatttcctctttttttgcttctaatttttcaaataaactttcttttacattcataaacattcacttctctcaattaaatttaaaacatatcactctacaacaattttaaatttaatagtaaattaattcaaatataaatttaaattttaaaaactttacattttttatgaatatttttcaaaatgaattatcaatgcatcttagcattacgctatattcaattctgttgatttttcatttttataaaccatatacatcattgcactcgcaatcaataccatcgcgaaaccaaaataaggcgtcatagtaattgaaaaatgattaagtacgtaaccaccaatgacagaacccaaagtaatacctatattaaatgatgcaatatttaaactagacgcaaaattcgtagtcgctttatttttacgttctgcaaaaagtacaacgattaactgcagacctggtacattcataaaagcaaacagtcccataattaaaatagcgattgtacctaaaatttgatgtgataccgtcacaccaacaattaacaatacaatggcttgaattaaaaatataccgattaacacttgccttggacggttattcgttaatttaccaccaagcgtattaccaatggctaccatcacaccataaatcactaacaatataacaactgcatcatcactataatgtaaagtatcagtcagtagtgttgttaagtaagtgtacacaacaaaagtgccaccataaccaagtgcagtgattaaatataccatcatcaatgatttatttttaaaaacggttaactgttctaacatagatgcttgttcgtattcatttaaatcgttcggtacagatatgatattaattactaaacttaaaaagccaataatcgcaattgttataaatgaagcttcccaaccaaattgttgacctatccaagttccaagtggcacacctgtgattgtcgcaaccgttaaacctgtaaacatcatggcaatggcacttgaacgtttatcaggtgacactagatcactagcaatggctgtagcgatagacataaagacaccatgcattaatgccgaaaggacgcgcatagcaagtaacatactgaatgtcgttgaaaatgctgctaatgtattagcgataataaaaatcagcatgatccctatcagcaaatgcttacgttttattttatttgtcattggcgttaacaatggcgcaccaatcgttacaccaacggcataaagtgaaaccgttaatcctgctagtgaaatcgtcgtattaaatgaatctttgattaatggtaataaacctacacttataaattcagtcatgcctatagcaaatgcagacatggctaatgctaagattgcaaatttattttttctcataattttttcgctccttattttttgttgattgtgttactataattcacacatataaaaataggaagtacgcactttaaagtactataggtactttttagtgtctataaaggagctaatgaaatgagtaaaacatataatattggtgtcgaagcgacaatagatgttattggaggcaaatggaaaccggtcatgctctgccatttacaaaataatggccgcatgcgtacgtctgcattaaaacgtgccataccaacaatcactcaaaagatgctcacacaacaattacgagaactagaaaaagatggcattattaatcgcatcgtttacgatcaagtgcctccaaaagttgaatacgaactttcagaatacggtcaaacactgggtaaaattctttcatcactttgctattggggagaatttcatgtagaaaaaatgtataagcaaggcgaatccgttactttaaatcaacaagactttgtagatattcctcgtcctagctaatgatttattaagctatggtaaaaatcgaaaacttttattaattatttaaattacattattatccgtctaatttttagttattaaaagctataaaaatactcccgttcaagttgtcatttttaaatgtttactttaaacgggagcattgcttttatttagtataactttattcttttctgtgtttcttttatttaacgctttctatataatcatgaagacagtgcattttcaatttaatacacaaaggagttatccatatgagtaccttgtctttcatattaactttattcgttgctatagaatttttatacattctcgttttgcaaacctttttaacaacttcgaaaaaaacgagtcaacttttcaaaatcgaacagcaagtgtttcaacaagacaaattaaaaacgcttatgaaaaaccaaggtgtttataatggtcttttaggaatattattgttatatggtttatttttttctgaccaccccagagagcttattattagcatattgatttatatgatccttgtagcattatatggtgcaatcacaagtcaaaaaaccatcctgcttaagcaaggcggtctccctatactagcacttatctcgtttattttttaaatttatttcttataccgtagctattagctagttgtcttgagccatatctaatctatagacaaataatgttccaacaaataagcccagcaacgattgcgtgttgttgggcttgtttcatgatacttatttaatttttgctaaatccatacccgtggttctttctcttaagtcatattcaatctcttctaaactacgacctcgtgtttctggtaagtatttaattacaaaatacattgccaagatgccgataaatgcaaatattaagaatacccattctgtacttagggcactattcaatactgggaataattgtgccacaatcagcgttccaaaattcaatacgagtgttgctaaaccagtagcagcaccacgtgcacgcattgggaacatttctggtaacataacccaaagaataggtccccatgttaagccaaagaacacaataaatagtgataaacatacgataataataacggccgaagattcaatacctatcgtccaaatcaggatagccattacaaggagtgacatgaccataccgatgtttcctgtgataagtagctttttacgatcaattttatctgcaataaatactgcgacaatcgtcacaagtacattaatcgtacctatacccacagtacctagaatagatgtcgcttcacctagacccgctttactaaaaatagttggcgcataaaatataatcgcattaatgccgatgatttgttggaacagtgcaaatacacaaccaatcactaacgtaggtcttaaccaaggtgattttaagatagaccacgttgattctgaaatggctgcaatttctttcatttctttaatttctgtatttatttctttgtcgtcattaaacgtaattttcataacgtcacgcgcagctttttcacttttatgctctagcaaccatctaggactctcaggcataaatgcaataccaattaatagaataacggatggtacgacagctaatccgagcatccaacgccatccttccatatctgcaaaagcataattcactaaatatgctgctaaaatacctattgtaatcattaattggttcaatgaccctagcgagccacgataagccgtaggtgccatttcggataagtaaaccggaacagttgccatggagccaccgactgctaaacctataaccaatctaccgactacaagcatcggcatattttgtgcaacggccaatattaatgaaccgacaatataaacaatggctataattaatactaaacgtcttctaccaatcctatcagacagcggtccactcccacctgaaccaataatagcaccaacaagcatggatgctacaactaagccttctgtaaaactattcaatggaatatcatcattgataaaaagcaatgcccctgaaataaccccattatcataaccatataacaaaccaccaagtgcccctaatatgaaaatcaaactcttatttactttcaaatttaacatcccctttaaaattaattacagtatattcctattatgtaagcgtttcaaatattaaattaatttctcttaaaattttttgaaataaatatattttaaatctacgttatattattatttgataagtaattttactgtctaagttatataaattaacttttctaacacgcttaaactctacaacttctttcacaccatttaaaaaacccttgaaattgaagtttgaaattcaactttaaggattcactagatattatcttagcagttttgttttatttttatttttattttgctgtatagcttttacttgaaattttaccagcgtccacaataatatctttgttttggaaaggttcgttattgaaaaaacgcgttaagatatctttgacgccttcttcaatacgcgcttgtgcttctaaggtcatacctgaataatgtactgtcataccatttctaggcatcgttctccatgggtgatctgctggtgctggttgtggataccaaacatcacctgcgtaaccttgaatatgtttcgcatttaagagttccactaaatcgtttgtatttacaattttaccacgtgcagtatttattaaatagctgccaactttcatacggcttaacacatcataatcaaataagttatctgtttcaggtgttaaaggcgcatggattgtaaccgcatcacttgttgatactaattcatcaaaattaacaaaaatagaatgctcattatctttttgattgattgggtcatagtgttggattgttacattaaatggtgccaatctttcggctacaagttggccaattctaccgaaaccaaagataccaattgttttattttgtaattcatgcacatggttaccaacttttgataagttccattcgccatctttagcttgtctatgaccttcttcgtaatttctcaataagatgagtaaatccataactgcgtgttctgcaacactgatcgtattactaccagtgacttctacaacaccaatattgtgttcacttgccgcttgtaaatcgacgtggtctgaacctaccccagcagtgattactaattttaaattaggtgctttttcaatacgttctttcgtcatatatgctgaataaaatggcgcactaataacgatatccatatctgctaaatgtttatctaaatcagcttcattgtctgttaatataacgaattcgtgccctttttcttctaaaaatggtttcaaacaattgctctttcagtatttaataattgattatcttcgcctgctacggattctgggaataatgctacgattttcatgcttatctctcctaataatttatttttaaaactgtgcaatgttactgaacttatgtgcatcttcgaagcaaaaaaatactcgatacgatttgcacataccacctccttgaatgaatcattcaaaacgtagttagcaaatagcaccgagtaccttacaccattccgtatttattcaattgatttatcgaatacaaatattgatacaacctcatcatcggctaaatcaatatctgtaaataatttaacaaatttagctccaacgagcgtttccaatttcatctaatttaatatcgctgtataactgttttatcttttcagtgcggttatagtgaagcatgacttcattttgtttatcgcctaaataaaactgttcaactttacttaacgcgtccgtcatataggcaatagcccagtttccctttaaacgaaacttgtactttctcaggccctttacctacatgttgtttacgataagaacgaattaaatttgaaaattgttgttcttttttatgtgattctatttgactcaccttcttcacaaagtaatgagttatagctttcatttacttatatttctattatatatcaagcaatttaaaattcaagtgttattactttttttaaaaatcacactaaaaatacctttagtttcaaattcaatatatagtgtttgtattaatatatacaatacacataaactagctatcgtatctgtgaaataatgtgcttgtaaataaattctagatatcataatcgataagattaatatcgcgcctataaagatgacagccttatgtttcgctaataatacaatcaaactaactaagatacatacacttaaaacatgcatactaggaaaactataaccgtcgatgatcgcactcggtcttggacgttggatagcatattttaaaaatgttccaatagcaaagacactaaaacaccaaaatccataccaaacacatttaaatctatcataaatcagtaaacctagtaatatgattaacaccatacataaacaggcaataggtgaaaatactgttgaaatcattgttaaatattgaacgattatctctgaagacatcgtacgatgtagtaattgatatatgctagcatccatattttccgttaagttaaacgcaatgcatataattagcataatgagacacagactgcctaccgtcatttttaaataattattcacgttgactattccttccataacgcattcttctatataataagtaaaccaagtattttcaatttactcaatcctactttaggcttataaatattaatatgataaaatcataatatttataatgtatatgattttgaataaaacgatttgtatccttgcatggtcttatgctaaaatcaattaaagacttaaagtatctacaataactattataatactaaaggagttttaccttgaataaagaccagtttgaacaaatggcccacaagtatgaccaccctgacagaattcacctagcacaaatcattgcccaagcaacaaatcaattgctcaatcatacaacttaccattcgttattagattatggtggtggcactggactcgtaacattaaatatagatcatcactttgaacaagtcacacttatggatgcctcaactcaaatggtaaatatttttgatgaaaaaatatcagcattagaaaagacttctattcaaacacttgtcggcgatattttggctgatgatcatccattaaaccaatcaacctatgatgtcattttcttatctttagtcttacttcatagtggtgactataaagctttattgcataaactttacacgcacctcaatccaggaggcatgctgattttagttgattttgataaaaatgaaaatgttcagcatccaaaagtttacaatggctttaagcaatctgatattctagaaacctttgctcaaatagggttatcacaaacacaggctcatacattttatgctggtgatcatctttttatgaatcaacatgctagtatatttattgcttcgggttttaaataatttttacatttttaagtgtaactgctttctctcttcgtcacttaaaaatgcatagtctactgctctttcattaatatatttgacttgttctaatgtcatcatttcattttctataagtaaagtatattcttcatttaatgatgtctgtgtaacggttctattatctgtattaattaaaaaaggtatatcttgttctagcaaataaggtaaatttaatgcttctaaccctgtaatggccttggtttgaatattactttttggacacatctctaagagtacgtcattttctttaacaaactgcaatgattgtttatcttgatttatagcaacaccatgtccaatacgtttcgagcctaatttaataccttctatcacattatgcatacaaccgcactctccagcgtgtaacgtaagattgaaacctttatctaagccatattttattgtatcttcaatcgcttcagtaggaaatcctacttcaggacctgcaaagtcaatgccacaaattgcttcatgatgatgttgatgaataaaatcaaaaagtgcttggttttgttcagtatgatgttgtcgcatcgcacatactaacaaattaacgcctatccctaatgtattaaccgcttcattaacacctaactctactgcttccaacacctctgtcatcgttaacccttgatccatatgaaataatggtgcgaaacgaatttcaatatatttcacattatcgttatatgcttgcttggcaacatctacaaccgcacgtttcaaactatcttttgtctgaagtacttttaatatttcatcgaaacactgtaaatagtcatctaaactatcacactgactactgacaaataattttgattcatctaagttaacaccttgttcatctgcaagttgtctaatcaattctacacttgttgaaccgtctaggtgacaatgtaattcaaccttggcaatttcttctatggacttattcatgcttagaacctacctctacctacatttgattatgtttaaaatttatctatttactatatcatgatgcatttaactttgctacgactcaaattacatgtcgacataacgttgagccatcatttttaatcaactcattttaaattaagtataaccaaaaagcagtgtctgatgatgtatagtcatataaatacaatgtattttgggcgagacgcttgaaggaacaggacaagctaaagacctcagactgaagctggatccttagaaagtgagccaaccatacgaaaaattaaataaagaagaagcgctcagatccattgaattaaatcacctgagcgcttctttttctggggttgatgtatcacttccccattattatacaataaacaatatctacatagcttgataacattgattaaaaatagacatcatatttcacctaagtaacctaatatgactagtgaaatacctaaaccaacaaaactcataatgagtagcgtgacaacaattttcaattcagtcaaaaaatattttctatcttgtcctttatttacaagccaaacacctaaaaccacgacgagtacaaaaattataatcaaacaatatgcaattatatttaaaatgcccatatcaatgcccctttgcgtacgattcacatgttgaccttctgtatgcatcagttatttcgcacatctctatcacgttctcccaaacatcaatgcttaacctatactggtttcacatcaagatagtcatgtacttttaaatagtcaataatttgattaacagctgtttcaatactgtcttgctctgtatctataataatttctggattattgggctcttcataaggcgcattgattccagtaaatcctttaatttctccgtttcttgctttttgatacaatcctttaggatctctagattcacacgtttctatactacaagacgtgtatatttcgataaattctttgtcgtctaataagtttcgtacttcatctcggtcagcttgatagggcgatataaacgctgtaatcgtaattaatcctgcatcgaccatgagtttacttacttcgccaatacgacgtatattctcttttcgatcttccggactaaagccaagattgttatttaagccatgtctgacattatctccatctagtcggtacgtatgtacttgttgttgatataatgctttttctaatgctactgatatcgtagatttaccagaacctgataaacccgtaaaccagatgacaacactgcgatgttgattacgttgttgtctttctactttcgtaactgctgattcatgccatgtaatatgatttgaagtggccatgttcaaactcctttgatcttatttttcttgtaatcctttgataagtacatccgctacctctggtcttgaaaaagctttcggcaaggactctccgttttttaatttttcacgaactttcgtgccactcaaatgtaaatgttctgaagcatcgtgtggacatgttttggctgttgccatattttcacaaacattgcagtaaaaagcatgttcaaatttcaaaatttgtatgcccaattcatcttcatattgtgcgatgagtgtttgcgcatcgtaagttccataataatcaccgacacccgcgtgatcacgtcctacaataaaatgcgtgcaaccataattttttcgtactgtggcatgtaatatcgcttcacgtggacctgcataacgcatcgcagctggataaataactaatctcgttctattttccgggtaataattttttaatatcacttcataactttccatgcgaacggctgcaggaatatcatctgattttgtttcacctactaaaggattcagtaataaaccatctacagattctaaagctgctttttgaatatattcatgtgcacggtgtacaggattacgcgtttgaaacccaacaaccgttttccaatttaagtcataaaacaattgtctcgtctcagatgggtccaaatgataatcgacaaattcatcatgttttggtcgatctactaggtgaatgggtccagcaagatagacactgcctttttcatataccttcaatacacctggatgttcaatatccgtagtaccataaacgaatgctgcttctttctccttgtcataggtatatttttcctcaagttcaagcacaccatataaatgattatcttcaccatataacgcaatgctttcaccgatttcaagctcatttgctttatcttccgtaaccggcaacgtaatcggtatactccacactagaccgtttttcaaatggagattttcaacgacttcattataatccgcttcattcataaaacctgtaaggggactaaaaccaccaatgccaatcagttctaaatctgataaactccaagggttcagtgtaatggctggcatggaatgcgatacttccaacattgtttccttcagctcagcgttaacttctctattaattaatgtaccaccatgtggttgaatcgtattttcaataatctcttttgttaatgccatattgattcactccttttaatctatctcatttgcgttaacattcactttctttttagaaaaatctatgggtagctttttattttgatataaagcgaaaataattaagcctatccaaagcagtatgactgcaatttttatcactatggaagttgttgcatttaattgaaaaacactaattagtgaactgctatttgtaaaaataatcatcccaccgacacagactgctaatatattcatcggcaaaattttaactaaccatgctgcaaaaggtgcagcaatcaaaccaccaatacttagcgcaatcactaacccccagttaatctggctccatcccaagaagataatgaaactgatggatgctgaaatagtgacaaaaaattcacttgcagatactgtacctatggcatatctcggttctagctttttctgtgctaataataaaggtgtgttgactgggccccagccgccaccaccaatggcatctaaaaatcctgcaactgcgccttgcggaatcatggcataacgtccgatcgtcgaaggatctttaacaactgtttgatgacgtttatataaaaattgatataaaatatatatgcccattgttaatagaaatattgctataaaaggtttaatcaagtcactatgtatatgacttaaaaacgctgcgccaataaatgatgtaatcgcacctggtattgctaacttaatcatggtaggtttatgtacattttcaaatttcagatgtgaggtaccagaagcagccgttgttgcaatttctgaaaaatgtattgtcgcggatgcaattgctggtgcgataccaaatgtgagtaatattgatgatgatgaagcaccaaagcccatgcctagtgatccatcaatgagttgagcgaggaatcctgcaagtgcaaagataaataatttatgcatttgtcgtgccccttccgactttagtttagtgattcaagtttctttatcattttgatttgtttatttttatctctataggatggatctaacacatgtttcaaaaaatcttgtttttcttgcgtcgttaaattacttcgtttgatatgctgtctgcattcatataaaaaatccacatacgcttcataactgagatcgaaacgtgctttaaactcttctaaaatttgtgcagtgagcgttgggcttgcaccattcgtagaaatactcagcgttaatcgccctcttcttaatatgcttggaaatacaacatcaccagtatgtgctttagacgtcatgtttagtaatgcgtgttgcggtttagaagcagcgatttgttgatttacgcggttatcattcgtggcagcaatgattaaatctgcttccgcgatatcatttacttcaaatgctttagcacaccaactcatctcaccctgttcgtagcggtgatatagtgcaactgtaagtgaaggactaataactttaatatgggttgtatagttaactaatgtggcaatacggcgttcagcaacctgtccaccgcccacaatcacgacgcgtttattagaaatatctatcataagtggtatgaatggcataccatcacttccttgttaaaatgaattactgtgtcacatattcaaaagtctcttcaacacgtgctttcaatgcatcttgtaaatgttgatgtttacccaatcgtttacacaatataatctctttatcattttgatattctgtaaccgtatcaatgatttgttgatctaaaatacctgtaaaccataaataaggcacaatatatatttgggaacattccgtttgtactgcgctgtgtagtgcatctttgaatgcaggcttacaagctgctaagtagcaagtctcgatatcttcaatttcagtttgttcatacaactgtgtcttgatcgtagaaatgtctatttgtgtttggggattatagctgcctctaccgataatgagcacttttgcatccgaattaggcgtcacgccagattcttcaattctctgctttaatatctcagtcagtctcggttgtacgcctaacggtctgccataggacacatgtacattagggtatctttgctgactatgttcaatttctgctggaatatctttgtagtaatgccctgcacttaataacaacactggcacaactgaaatctctgtcgcacctttatctactagacgctgaaatccttgtgccaaattcggactggttaattctaaaaaacatgtttcctgtaatggcacattgacctgcgctttgactaaatcaataaagtctgtcgcttcgttcactgcatctggaaccctactaccatgactcacatataagacacctcgcatagttacccctccttatttatagcgataaactcacctattttactttctattgatatgttaatttcgctactgctgattcaacaggcatttcttcaaaccaactaatacgttctcttagtttgactacttctccgacaacaatcatcgctggattttcaatatcctttgctacttcgacaatatttgataatgtacctaccacagttttttgaaattcagatgttcccagatgaactaaagcgacaggtgtctcagatgaacgaccatgtttcatcaataattcactaatttcaggtaattttttaacacccatataaatacatagcgtttccggcccaagtgcaagatgtttccagtaactttctttatctatatttttattaatcacacctgttacaaatgcaacagatgaactatagtcacgatgtgttactggaatacctgcatatgctggtgctgcaacacctgaagtgatgccaggaacgatttcgaatggtatatgatgttcggctaatatctctgcttcttctccacctctaccaaagataaatggatctccaccctttaatcttgtgatggtttgtcctttctttgctagattgacgagtaatttattcgtatcttcttgtggtaatgaatgacgattcggatctttcccacaatacataaatttcgctgaaggcgatgcatgatttaacaacgccttgttcaccaatcggtcatacaagatgacatctgcttgttcaattgcttttaaccctttaactgtaattagatcagggtctccaggccctgcgcctactaaaaatactttccccatcctgtcaccactttctcaatttttaactatggaatgtttgcccatctctgacttcttcaacgatgccagcacgtacaacgaaatcaccaaaatgttcgccttctgttctttcttttgcatactgtaataaaataggtcttaaactttctaaaatttctgcttcaccgatattttctttgtagattttgtttaatctatcacctataaagccaccgcctaaatacatattgtatttacctggaccttttccaataaatgcaacttctgctaacgctggtcttgcacagccatttggacaacctgtcattctaatcgtaatttcttcttcttttagacctgcttcatcaagtaaatcttcaatcttcgtaatcaacgatggtaaatatctctctgactctgccatcgccagtccacatgttgggaaagcaacacaagccatagaattacgtcttaaacctgtataatgttgaccatctgtaataccaaaatctgtgataattttttcaatttcattctttttatgtgcagctacattcgcaatcacaaggttttgattcggtgttaacctaaaatcacctgtgtgaacttctgcaatcgttcttaatgccgtttttaatttataatcttccgtatcttttacacgtccgttttgaacaaagagtgtatagtgccacttaccactaccttcagtccacccatagcgatcaccattatgttcaaaatgataaggacgcttgttttctaattgccaacctaagcgattgttgatttcatttctaatccaatcaacgccaagtctatctactgtatatttaaagcgtgcattcgtacgttcttcacgattaccataatctctttgaaccgttaaaatcttttcacatacatcgacgacttcttccttaggaatgtaaccaatcaatctgccaacttgtggataggttgctgtattaccatgtttcatacccataccgccacctacagcgacattaaagccaacaagttgttcattttctaaaatagcgattaatccaatatcttgagaataaacatctatatcattagatgggggtactgcgataccaatcttaaatttacgaggaagatatgttttgccataaattggctctggttcttcatcgctagtatctaagactttttctccgtctaaccaaatctcatgataggcttgtgttttcggcgataaatgtctactaatatcactggcaatttgattaatttcactgtgcacatccgattgatatggattagggttacacataacgttacgattcacatcaccacaagccgcaagtgtatctaataaggactggttaatatctttcatcgtttgttttaaattgcgttttaaaataccgtgaaattgaaatgcctgtcttgtagttagtttgattgtgccgttcgcatatgtattagcaatatcgtccatcgctatccattgctctgctgttgatgcacctcctggcgcacgcactctaatcatgaagctatacgcaggttctagcttttgtcttctacgttcatcacgtatatctctatcatcttgcatgtaactaccatggaattttaaaagtttcgtatcttcttctgcgatagcgcctgttactctatctgccaaaccttgaacaatcgatcctcgaagataatcactatgtgctttgatacgttccatttcatccagtttgtctgaaaaattgacttttgtttcagccatgtaatcattcctttcttagtaaacatctctttggtaacgtttttcttgtttcatttgagtaagataggcttctgcatctgcttctgacatgtcaccttcttgctctataacactacgaatggtgtcatgtacatcttttgccatgtgtttttcatcaccgcaaacatatattgctgcaccatcttgtagccattgataaaatagctcactttgttgggcaatacgatgctgaacataaattttttcttctgtatctcgtgaaaaagcgagatccagtttagctaatgtttcatctttcagccatgcctgccattctgtttgatataaaaagtctgtagtaaaatattgttctccgaaaaacaaccacgtattgccagataacccaagctcttcacgttcttgcatataagctctaaatggtgctacgcctgtgcctggccctatcataatgactggcgtttcttcatcaaatggaaacttaaagtttggattttttttaaggtaaatcggtaatgtgtctccaggttgaatccgttctgctagttggacagagcacacacctttacgcgtgcgttcgtgcgcttcatatcgaacggcgccaacggttatatgcacttcatctggtgtggcctcataactactagcgatagaatattctcttgctggcaatttccttagtaatttataaaatgtttctggcttcagttctgaagttggaaattctattaataaatctatgacatcgcgaccatcaacatattgttgtatccattctgcattgtctatttgactaagtaactccgtattgccaaataactccgctgctttttgaagtaatggtttcgtcagcttagtaatctcaaagtgttcagttaacgctttttccaatggcaatgtatcgccatcatcattgattggaatttcaatatctttatcccaacccagtgtctcaatcagtagtgtcacaatttctggttcattttgaggtaagactaccacgcagtctccaggttcaaatgattcaccgtaattatctaatagcaattcaacatgtctaacttctttgttagaacctcgaccattcagattgatattctctaacacttcagctttgtaaggattcgattttgagtaacgtttttctttggcagattgtactgtttcagtagaagtcaccgttgaaccatgacctgtagattgatttagaatttcaatattcttattcatccacttttcagctaaatcatcaaaatctaaatcacaatcttgtctatccgtaaggcgttcagcacctaattctaataattttgcatcgaagtctttacctgtttggcagaaatactcgtatgactcgtctcctaatgcaagcacggagaaccttacattttctaattttggtgccttacgactatgtataaattcatgaaatgtaagtgcattgtctggcggatcaccttcaccgtgcgtggcagtaatgacaaataaatcctccacttttttaaattccttttgtttaatttcatccattgccgttaacttaacagtgtaattatgttcgaccagtcgatctgcaaatatttcagctaaactttgtgcattacctgtttctgaaccataaactacggtaatgtgacgatcgttgtttgtttggctttcggattcattatttaaaacatattctgccacctgttgtggcgcctcagttgtttgtgctacagccccttgttgcgctgtaaggtaaccggttaaccatatttgctgttcagcagttaacgtctgaaaaatttgatttaactgtgctgcttgttcttggtcaaaaggactatttgatactgataaattcacaatgcattcaccccgatatttatttgataaattataattattgtctaaataggtttaatcaatttcatttcttgccatatcaacgatatagcaatcgaattttatatcttctacaacattcattatatttccgatacgaatactaggttattagtgtaaaaaaaagaatctacttaatttatggtttattcgtcgtatgtagaccacattccgtcttagtagaattcgtccatctacctgctcttgaatcaccattaccagaaacggcctcagtacatggaatacaaccaatacttggaaaattgaaatcatgtagttcgttataatgtaaatcatgcgctttaatataatcccacacatcatcccaagtccaatgaatcagaggacacacttttactgatttgaatcgttcatctttattaataaaattagttgcctgtcgactcggtgattgttcttttcttaaacctgaaacccaagctgtcgccccagatagcacttcttcaagcggtttaattttacgaatataacaacattgatttggatcttgtttccataaagctggcgcaacttgatccgcttgttcttctaaagtaagactcggttgtttaagcttaatgtttaattccggataacgtgctttaacacggtctatcaaatcgtatgtctcttgaaagtggagattcgtatctaaaaatacaatttccgcatctttcttcacactagaaattaaatcaattaaaatcatgccttctgcaccgaaactacatgaataaataatagaatcaccatatacatcgtaagcccatctaatcacttcacgtgcacctttagtttcatcagtgatatccagtgtttcaaaagcgtgtggattgaaatcatcatacgtaatttttgtttctgacattaacgggtcccccccttttcttctaatgtacgcttacttaaattcaagttatacttcgttttttgaattatttgaaaataattatgctacacactttactcattgaaattttttatgtcaagtttgtgtttattaaaataattatattaattttttgacaaaatacaccattgaaaccgctttaaaaagcgaagttaaaacgttttataataattattttcacacaatagtcataataatctagttactttcaaatcgccctaaagcctatggttatcatgttttaaatttttttaaaaattttttaaattttaataataattctaatctagaaacaaaaagcgcaggtatataacatcaaatatttaatttgatgttatatacctgcgttgcaaaaatgattaaatctctaataccttaaatctttaatccttttatattatactgaaaaactgagtcttggtataaatgtttcaaaatgaacatgattcatagaaatacctaatgtttgtaattcagcaatcattgcttttaagaatgagttaccgccacacacatagatctccgtctcattgtccacatattgacgcagttgttctgattcgataaaaccatcttcatcacgaaaatgaatatcaaactgggcatggtctgattgatttgcaattgtagttaatttttcttcaaaagcaacattttgtgcgttagatgttgattgtaagaaaatagctggtgtacctatgttaacggcttcattaaacattgagacaagcggtgtaacccctacacctgaacccaaaaataattgtttgttttctatattttctaatttaaatccacctactggtgcagatatatttaaaatgtcaccttcagttacttcatcgtgtaacacagtagaaacttcaccttcgtgcgtttcagtaacatctcttcttacaccaaatgttaagtaactttcatctccatcaactatggaatagtgtctttttgcacgataaggtaatttttcactagaaatatctacagttatatattgtcctggtataaattgacttaaatcaatgcgatttgatgtgacagtaaatgatttaataagttctgtctcctcagtgatatttgtaacttcaaatggtttaaaaccttcccatgccatttgtttataaatatctttttctaagccaataaaggcatcagcgatagctccataagcttttatccatgtttgaataataggatcattattttctaaacctgtcacttcttggattgcccaaattaaattttctccaacaatatcataatgttccggttgcacttgtaaagcacaatgtttataaactacaggcattattgctggtacgataggtgttaaatcttcaatgttttccgctgctgccagtactgccatagcaagtgctgatgattgcagtccctttttttgatttgtttggttaaatacattttttaattctggatgcacttcaaataaccttttatagaaaattttcgtaatagtttgtcctttttctttaagtaatggcactgtatctctaattgtttgaatttctctttctgttaacatattatacctcctaattacttctcaccactattattgtacgaaataatataacttacaatcattaacaattaattcaaacattttctaaatgcatagttcacaaaatgttaactaattaaaaaaagtataaattcaaattctttggtatgtattgatttgctcacattttataaattgaaatcgtatattgtatgatctaaaactttaatccactatgattagtcaactaaaaccacgctaaaaagtctgtacttcactactttttagcgtggttttttattcttatttttcacttaagtataaatcttctatgactgttgctacggattcagcattattttgaatatacacatcataagcctcagagcagcctgatgtgccagtcacataaaaagattgttgggcatggtttaataattgcgtatcgttcacatcatttccaaaagcaatatagttttgtgcaccaatcatgtactttaaggtagagtgcttattaatgtttatggctgtaatatctatgctatgatccacttcgtgtatatggattgataatacatcctcgtaactttgaaaccattgtttaagtgctttaaatgttttttcctcagtcgcgaatagaatcaccttaattggatgttgaatatgagcaaccttcacattctttgctaaaccatctggatctaattgtctataaattggatggctttcacttacgttagcagcatagtcaaaatctccatcgataatatattttaaatcataatcgctgattaacttcacaatcttttcaaataaatcattcgggatataagccatggtttgaatttctccaacttttgaaataatagagccatttccaccaatgagccaatgattactgtaatctctaacaactggtaacaaatcacgtataggtcgtgctgacgcaaatatgatatcgtgttgccgattcaattgctgtatcacttgatttaaccgtgattctataaatttgccattaaaacaaatcgtgccatctatatcaaaaacaaatatcatagtcatacctcttttaaatttttattcatcatgctgatatttagcatttaactgatgaattaatcgtttaaattcatcctctgatttaaattcaaacgtaatttggccttttttatttttagtggaaatagctacatttgcaccatattgcgctttaagttgacgttcttgttgtctaataaactttggttttgttgccttttgtgtagcctctactttatctttattatcactataatgtgtagtgacataatgttctaattctcttacactccatgcctcacgggaagcttgtttggcaatttgttgcattttttgtttgtccttaacacttaataatgtgcggccatgagcgcttgataacgcaccatctctcaccatatttgaaacagtctgtggcaagtttaataaacgcaacatattcgcaatgtaaggtctagatttacttagacgttgcgcaacatcttgctgcgttaaatttaagtcatccatcaatttacgataactttccgcttcttcaattgcatttaaatcctcacgctgtaaattttcaatgattgcaagttccatcatatcttcatccgtaagtgatttaacaatcgcaggtatttcagtcaatcccgcaattgttgcagcacgaaatcgcctttcgccgacaacgatatgatagccagaaatcgtttttctcaaaacgatgggttgtaatatgccgtgaagtttaattgatttggcaagatcatttaatcgttcctcatcaaatgttttacgtggttgatatggatttgccttaacagtagtcatagctattttttgaatattttcgttatcttctatggttaattgctcatcttgatgattttcgattgtcaaacacctactttctattttctctagctcgtttaatttgatttattattagatgtgcctattatatcatcactcatctaccaaagaatataggacaaataattagtttaatcgaaattttcagataagttgttgacaaaagtaattttaatgtgtaatcttgggtatatcaaattcgaaataatagaaacacagtaacaaggaaagtagaacttacactgctgacacagagagtcttcgtaacgctgaaagaagatacagaaagaaagtttgaaaatggcctttgagtgttgatgccaatatgaggtatcaacgggcgcgcccgttatagcgctacagtattaacattttgttaaatggcgtactggattattccacacgttatcttctcgttaatactcattttatttatagaatgggttttttatttacgaaaaatgataacacgattcagtcaacgttacatatacaacaatttagcgtactggataaggttactttagtgataatgtaacaaacaaaggtggtaccgcgagctaagctttcgtcctttacatccgaattttcgggtttaaaggacgggagctttttttatttttacaaggaggttaacaattatgaaaaatactgaactagcacaaatcgcattgtcacatgatcatacaggcgccatagccaatccaatttacttatcaacagcatatcaacacccacatctcggtgagtcaacaggatatgattacacacgaactaagaacccaacacgctcagcatttgaagaggcatttgccaaattggaacacggcacagcttcatttgcaacatcaagtggcatgtctgctattcaattaatatgtaatctgttcaaatctggtgacgaaatattggtatctttcgatttatatggtggtacctttagacttttcgatttttatgaacaacagtatggtatccatttcaaatatgttgacttcctcaattatgaagaagtggaacaaagtattacagaacatactaaagcattgttcattgaaccaatctcaaacccacaaatgattgaagtagatgtagacccgttctatatcttaagcaaaaaatttaatttattaactattatagataatacatttttaacaccatacctttctacgccattagaagatggtgcagatatcgtcttacattcagctacaaaatatattggcggacataacgacgtacttgctggtgtggtaaccgttaaagataatcaacttgcagaacaattaggacagttacacaacatgattggtgctactttgtcaccattcgatagctacctactccaacgtggtttaaagacactccatttgagaatggatcgttcagaatataatgcgaaattactctcagaacgatgtagtgacttagaggccatcgacaaagtgctttatagcggacgtacaggtatgttgagtttacgtttaaataaagattataaagtggataaattcttagaacatttaaacgtctgtatttttgcagaaagtcttggtggtacagaaacatttatcacatttccatatacacaaacacatgtagatatgccagacgcagagaaagacaaacggggcatcgatgaatatttgattaggttatccatcggtatcgaagactatgaagatatcgaacaagacattattcaagcattagaaaaatctaaacaaggagtgatttcatgagtttatcaaaagaaactgaagtaatattcgattcacatagaggtgtagattacgattctgcaaatcctcctttatatgattcttcaactttccatcaaaaaacgcttggcggcggtgcacaatatgattatgccagaagtggtaatccaaaccgtgccttattagaagaaaaattagctaaattggaaggcggaagtcatgcctttgcatacgcatcaggtatcgcagccatttcagctgtgttattaactttaaatgcaggtgatcatgtcatcttacctgatgatgtttatggaggtacgtttagattaacagaacaaattctaactcgttttaatatacaattttcaactattgatacgacgcatttaaatgaaattgaagaggctattcaagataatactaaactgatatatattgaaacaccttctaatccactgtttaaaattacagacattagaggcgcagccgatattgctaaaaaacatcatctcaaactcgccgtagacaatacgtttatgacaccactaggacaatcacccttagctctcggcgctgatattgtcgtgcatagtgctaccaaattcttaagtggacatactgatattattgcaggcgtagcaataacaaacgatcaaacgattgccgatgcattatatttattacaaaacggtacaggtactgccctatctgctcaagatagttggacactggctaaacacttaaaaacattacctgtacgttttaatcaatcagttgaaaacactaaaaaactttatgagtatctagcacaacgtgatgaaattgcagaagtctattaccctggaaatagcgatttacatttatctcaagcaagtcatggcggtgctgtattaggtttccgcttaaaagatgagacaaaagcgcaagattttgtagatgccctttccttacctttagtttccgtcagcttaggtggtgttgaaacaatactttcacaccctgctacgatgtcacatgcagctgtacctaaagaagtaagagaagccagaaatatcacttttggattatttagattaagcgttggattagaaactgcagatgaattaatctctgatctaaattatgcatttaaggaggccttcaatgagtcaactactcgacaaactaaagcacaacatattagtagctgatggtgcgattggaaccattctatattcagaaggtctagatacatgcccagaagcctataatattacacatccagataaagtggcgcgcattcatcgttcttatatagacgctggtgccgatattattcaaaccaatacgtatggtgctaattttgaaaagttaaaaccttttggtcttgagcataaagttaaagacattcactacgcagcagtagaaattgctaaacaagctgcaaacgacgacacctttattttaggcacagtaggtggattcaggggtatcaaacaagaagatttagaattatcatcgattcaatatcatacagaaatacaaattgagacattaatcgatgcaggtgttgatggcattctatttgaaacatattacgatttagaagagcttacaaccattatcaaagctactaaacgtaaatatgatattccgattattgctcaactcacggctttaaatacaaactatttaagaaatggtactgaaatcaatacagccttgcaacaagttgttaagagcggtgctgatattgttggactgaattgtcatcacggtccccaccatatgcaacaatcgttttcacatattgaattgcccgatggtgcttatctatcatgttatccaaacgcaagcttattagatattgaaaatagtcaatttaaatatagtgataatgcagcttattttggaaaagtagctgagcaactcatcaatgaaggcgttcgtttaattggcggctgttgtggcacgacacctgagcatattcaatacatcaaatcatcggtctcagatttaaaaccggtaaaccaaaaaaatgtcattcctatcgctaaatatacgggtcattcggagaaaccaacacaaaaacaaaatctaacatcaaaggttaaacacagacctacaattatcgttgaactagatacaccgaaacatcttgacacagacttatttttcagaaatatcaaaaaactcgacgatgccaagattgatgccgtaaccttagctgataattcgttagccacagtaagaatcagtaatgttgccgcagcgagtatcattaaacaacaatatgacatcgaacctttagtccatatcacttgtcgtgatcgcaatttgattggcttacaatcacatttacttggcctatcactcttaggtattaatgaaattttgaccattacaggtgatccttcaaagattgggcaccttccaggcgcaaccaatgtatacgatgtgaattctaaagggttaactgaaattgctttacgcttcaatcaaggtattaacacagacggtgatgcgctgaagacgcagacgaacttcaacatcgcaggggcatttgatccaaatgtaagaaaattagacggtgctgtacgacggttagagaaaaaattagaaagtggtacccactactttataacccaaccggtctatagcaaagagaaaattaaagaagtctatgaagcaaccaaacatttagatgtgccattgtttattggcattatgcctgtcactagttataacaacgcattatttttacacaatgaagtaccaggcattaaattgtcagaagacattctcgaacaatttgaagctgttaaagatgataaagcaaaaacaaaatcattgagcattgaattatcaaaagcattgatcgacacagtgcatgaatattttaatggcttgtatttaattacaccattccaaaaggtcgattatacactggaacttgcaaattattcaaaatcaattacttcaactaaacaggaggcaatattatgacaattcaaacatcaaacttaggttttccgagattaggtagaaagagagaatggaaaaaagccatcgagggctactgggcaaataaatatgatttagaaacattacatcaacaattaacagatttgcacaaagagaatttattactacaaaaaaattataatttatctagtattccggttggcgacttttctttatatgaccatattcttgatacatcattacttttcaatatcattcctgaacgtttccaaggtagagatatcgatgatgacttactatttgatattgccagaggtaacaaagaacatgttgcaagtgccttaattaaatggttcaacacaaattatcattatattgtacctgaatgggacaatgctgaaccaaaattaaataaaaatgtattattagaacgctttaactatgcaaaatcattaaacgtcaacgcacaccctgtgatcgttggtccaattacgtttgttaagttatctaaaggtggcgaccaatcatttgaagaaaaagtacaaacattattgccattatataaagaagtcttacaatcactcgttgatgcaggcgcagagtatattcaaattgatgaacctgcacttgttacggacgatagcgtagattacgaagacatcacaaaaacggcatataattatttttctgaagcaaacttaggtgattacctagtcgttcaaacttactttgaacgcgtaaacttatcattcttaaacagcctaccaatcagaggtatcggtctagatttcgtacacgaccacggctttaatcttaaacaaattgaagacggccaatttgatcgtacgaagacactctatgcaggtattattgatggtcgtaatgtatgggctgctgatatagaagctaaaaaagagcttatcgaaacattacaaaattatacagatgaccttgtcattcaaccttcatcttcattattacacgttccagtatcacttgatgatgaaacacttgatacttctattgcagaaggattaagttttgctactgaaaaactagatgaactcgatgcgttaaaacgtttattcaacaaagacgatgatcaaaaatacaatgaattgaaagcccgctatgaacgctttcaaaaccaatcatttaaaaatcttgaatacgactttgatagcgtcagaacttctagacaatcagcatttaaagaacgtaaaaaagcacaagacgcacgcctaaatttacctgatttaccaacaactacgattggttcattcccacaatctcaagaagtacgtaaataccgtgctgattggaaaaataaccgtatcactgatgaagcatataaaacatttctaaaaaatgaaattgcacgttggataaaaattcaagaagatatcggtttagatgttctggtacatggtgaatttgaacgtaacgacatggtagagttctttggtgaaaaacttcaaggtttcctagttacaaaatatggctgggtacaatcatacggttcacgtgcggttaaaccacctgttatttatggtgatgttaaatggacagagccacttactgtcaaagaaacattatacgcacaaagtttaactgataaaccagttaaaggtatgcttactggtcctgtcactattttaaactggtcatttgaacgtgttgacttaccacgtgaagaggttcaagaccaaattgcattagcaattaatgaagaagtattagcgcttgaaagtgaaggtattcaaatcatacaagttgatgagccagcattaagagaaggcttaccacttcgttcagaataccatgcagactatctagataaagccgttcgttcattcaaactctcaacatcttcagtcgctgatgaaacacaaattcacacgcatatgtgctattctcaattcggtcaaattattcatgcaatctatgatttagatgcggatgttatttctattgaaacttctcgtagccatggtgatttgattcaagattttgaagatattacttatgatttaggtattggtttaggtgtatacgatattcacagtccaagaattccaactgaatcagaaattacagctgcaattaacagagcattacaagaaatagatcgttcattattctgggtaaatccagattgcggtttgaagacgcgtaaagaagatgaagttaaagaagccttaagtgtgttagttaattctgtcgataaattacgtaaatcaacaaatccagcaactgtttaaaattaacttaaataggtgatgcgtatgagttatcctttatggaagcaattagaagaattaaaatcagcaacgtgggtcgatttgacccacacttttgatgaaaccataccgtgttttagcgaatttgaacgggccaagtgtcgacactattcaatgtcgcagacgacggattctatgttcaaaattggaatgttgtgagtcagtatggtacccatattgatgcaccgattcattttgtggaacatacgcgctatttacatgaattaaatttaaaagaacttgccctaccactcgttgttttagatttttcacaaagcgttaaagcaaattcggatttcatcttaacacgtcgacacattgaacaatgggaagctgataacggccctattgagcaaggcacctttgttgcatttagaagtgattggtctaaacgttggcccaacattgaagctttcgagaataaagatgatgctggtgcgctccatttacctggatggggactagacgcattaaagtatttatttgaagagcgccatgtgaaaaccatcggtcatgaaacatttgataccgatgcctctatcgatgtcgcaaaaaacggtgacattattggtgagcgttatgtattaggtcaagatactttccaagtagaactactgacaaatcttgatcaactcccaagtcgaggggcaattatttacacaatcagtcctaagcctaaagatgcgccaggtttccctgtacgcgcatttgctataaaaccttaaacatatattcgtatacgacaacatcgtatttcgtttattactattaaaacctagccattatattaaaaattaagaacttgagcacttcttaatttacgattctcctttaaaatatataacatgcccgcatcattatcgatatgatgtgggcatatttaagtgtactggatatatgagctgtataggtcattagtttgattttcaaataaatgataattcctatcatttaaaatgattcaatcaatgttataattcaataaaattcaatatagtttatcatagggcaaatgcacctattttctatataaatataatcaatagaggtgacatccgtgcaactgaaccaaaccaacaccccttttaatgaggaacaattggcacttatcaatcaactactacctatgttaacacctgaacaacaacattggttaagtggttatctactcaatccagcaacaacttcagtgtcagataacaaaacggacatacaagaaaatgaggctggtattaccgaaacagaaactagcacttctactgaccagtccgtgtcagaacctgtatcagcttcaacagaaccactagacgtgcatgtactatatggtactgaaactggtaatgctgaagaaattgctgaaacatttgaaacaaaactcaaatcccagaacttaaatgtccatctctgggatatggatgattttccgagagattcattacctgaggttgaacacctttttattatttgttcaacacaaggcgttggcgaaccacctatcaatgcgttagatttatatgattaccttcacggtgatgatgcgccacaattagatcaagtcaactttgcggtactagcgcttggtgaccaagattttcctgatttttgccaagctggtaaagactttgattatatcttaggtcaactcggtgcgaatagagtggcagatagagtggattgcgactttgattatgaagagacagctgaacaatggattaccaacatgcttgagctattaacacaagcctcatccaatacaaatgaagagacgcctagcgttgaaaatgaggacgtcacaatagaagaacctcaagcaccttattcaaaatctaatccttttcaagcagaagtactgaaaaataccattcttacacaaccagaagcttctcgagaagtaagacaccttgaaatatcacttgaaggttatcgtgaggcctatgaacccggtgatagcttagttgttatcccacaaaacgatcctgtactcgtgaaccaactcatcgatgcacttaattgggatgctgaaacacctattcaaatgaacgacagtgattcaatgcgttcgcttaaagaggctttaacacatgattttgaaattgcaaaattaacgcctgtgctgatgaaaaatgctgcagaattattaggtaatcccatgttaaatgctaatattcaaaaatcggaatgggtccaaaactatatttacggtaaagatgtcattgatttaattagagattttacgcctgttgcgcttgaacccaacatgctaccacaactgttaagaaaattaccgccacgagaatattcaattgcaagtagtaacaaggtaaatcctaatagtgtacacattactgtacgtgttgtgaaatacgaagcacatcgtcgtgaacgctttggtgtttgttctgtccaattagcagatcgtacgtctgttggggataagctacctgtatacttgaaaaagaatccaaatttcaaatttccatatgacacagaaacacctgtcatcatgattggtgcaggtacaggcattgcgccttatcgtgcttatcttcaagaaagagcttatctcaatcttaaaggtgagcaatggttgatttttggcaatcaaaattatcatcatgattttctttataaagatgatttggaacaatggctcgaagaaggtgtattaagcaaattagacttagccttctcaagagaaactgaaaataaaatttacgtccaacaccgcatcgaagaaaatagtgctgaattctataaatggattcaggcaggtgccacaatttacctgtgtggtaataaagatgagatggcaagcggtgtacacgaatcattaattaaagtactcatcaaagaaggtaacttggatgaaactgaagccgaagcctatttgacagaaatgattaaaaatcaacgttaccaacgtgatgtatattaagtacatcacaaatagacttcaaaaaatgataaaaaagaggctaatctgatgagtcaattcatagcaacatatgcaaatacactattattagttaaacaagttaatggtcgttttcatatagaaaagaaactagaaggaatgaaccccaccgccatcgctcaggatccattcaatcctgacatattatattgtggcacgtttgatcgcggtttgtggaaaagcgtggacaaaggcgattcatggttacctattggcacacgctttacgtataatagtccttttaaaaagcaagacattcctatgacatccattactgcagtctcagtcatagatacaggtaacaatactggtgcggtattagtaggtacagaaccaagtgcactctttatttcctatgatcaaggtgactcatttgaattactgacagatttcgcacatattcctggaaaagaacaatggtttttccccccaagaccgcacacacatcacgttaaatggttagataacaatcatcgctcgcccaatatcatttctcttacaattgaggctggtggtttgattcaatctacagattctggacaacattgggaagtaccgcaaacggatcatgcgcctatcgatattcacgtactcaaaagtcatgacgagcatcccaacaaattatatggcgttctcggagatgcctttttaaatggtggtagagatacctttattgaaagtgatgactacggtaaaacatggacaacatttatagatggcattgagcatagatatggttatggcttggcaatcaattcaaataatgctgagaatatcgtcatctcaacatcaaattcgccaatgaatgcccatagttatgaaagtcacacattttcaaccatttatgctattgataaatcacgagataatgcctggattgaagcaactgaaggcttaccttccacaaatggcacgcttatctccgctgtcactgaaagagatggtatcttttatattgcgaataataaaggtatcttctcttccgacaatggtggtaaaagttggcatcctttgaacataacatggccaaatgaattaacagagcaacatgtttatcaattgatcactttagactaagtaatgttagtatagatgatataagtaaacacccaaaagattgtatgataaattcaatcttttgggtgtttttatttacacgtttttacccttaatcgcgccacttagcttcatatagaagccacttgcctgtctatatagtattacaatcaaaaatttgttttacttaatgtaaggggagggactgaacatgaaagtaaaggttgtttatgatcaaacattagacgaagatgaaatcatactatacgcgcataaagatgccaacaatttatcagatattatcaactcaattcaacaattatctcaaaatatattatttcccggaaaatacaacgaaaccatctattatcttaaaccacaagatatcatttgttttcggatagaaaataagatattaaatgttatcaccgctcaacgtcaatatacgatgaatcaacgtttatacgaaataaaagcacagcttaatcatagctttctacaaatttcaaaatctgaaatcatcaatgtgaacttcattgattatctaacattaaataaaaaatggcacgattgaaattcgttttactgatcaatcatttacgtactcttctagaagatacttaccattaattaaggaggctttaaagctatgaaacgattctttcacggtgtaaccattggtattacgattggcgtctttgtctctttaatattttcaacactatttgcgcaccaccaatttcatccagtttctccagaatcaacgatgggtagcatttactttgcacatttaactgaattacaaattatgtttattgctgttgtgatatgggcattaatcggtatcacattcagttatggcgcgcttatcttttcgaattcacgaaagacattatggtttaaaacattaactcactttagtttaatgctcatcatcatgttcccactggctatattagctggatggtttcctcttaaactttcagcaatcatactatttgtggtcatttatacaattgtttattttatcatttggggtattgaaacaagacgtaatcaacaagatatagacgaaattaataccatgctctcaaaacggaagggatgatttgatatgaatcaaggtcgttatactgtactacctaatgaatcggtcactgtatttttgattggccttcacatcaacaagtggtataaagtccatcactggttgcctgtacttttagctatgccaccaatgctctcggaattatcaaaggataaatcactcggttgtttatcttatgaaatgttgtttaaatatcgtggtgttatgatcgttcaatattgggaaacaaacgaaaaattgcttagttatgcaaaaatgcctgtacatttaaaagcttggcgcaaattctcgaaaaaattaaagcataatgaagccgttggtttttaccatgaaacatataatgtagattcccatcaatatgaaaatatttatatcaatatgcctgatttcggtctcggcaaagcactcggtaatgaacctgtaagcaaagccacacatactgcaaaacaacgactaaaaaaacatacttaacgcgtattttaaatcaaacgatatcataatcatagagttgaagttgaaatgtcaaaggcatacgtactgtcacaataacaatcatttattacgagatagttatagcatcttttactgaaattcataaatgtcattcgcataaaaagaaaacgacaatttccattactgcagaaattgtcgtttttattttgaaatgtttatatcccaaatattttatttattgttataacttcatttactaatccatgtgttatctcacatattcaaaaattccagctgcgcccatacctacaccgatacacatggtaaccataccgtatcgtgtttctgggcgtttcttcatttcagacaataagcgccctactaacatcgcacctgtagcaccaagtggatgtccaagtgcaatggcaccgccatttacattcgtcttctcagcatctaatcccacttctctcatagaagccaatgtttgagaagcgaatgcttcatttaattctactaaatcaatatcattaacgtctaagttagcttgttccaatacttctggaatcgcatatgctggaccgatacccatcaatttaggatctacccctactgctttaaatccaacaaagcgtgcaataggttctacgcctagctccttcactttgtcaccagacatcacaacgacaaaacctgagccatctgttaatggggccgaggagcctgccgtcactgtaccgtcagccttaaatacggttggtaatttagctaaagtttctttatttgtatctggtctaatgagttcatcttctttaaatactgctttactaacaacaggtccattgtcatcatatgttacttgattgacttcaataggtataatttcatcatcaaatttaccagattgttgcgcttctgctgcgcgttgatgactttgaactgcatatgcgtcttgatcttctctagaaacatgatatgtttctgctaccatttccgctgtaagccccatcgggtatgaaacgcctgaatcttcatcttgaagaatcggattattcgttggttcattaccacccattggcacagcgctcatcaattcaataccacctgcgacaataacatctgcctgatcggcaataatttgatttgctgcatgtgcaatagtttgaagtcctgatgagcaataacgattgaccgtttgacctggtacttcattcggtagacctgctagcaaagcaatggttctagcgatattttgcccttgtaaaccttctgggaatgaattccctacaatgacatcttcaaccatactcggttcaaacgaaccaccgactctttctaatacaccttttaatacttttgcagcaacctcatctggtctttcatgtgccatagcaccatttttggctttgccagctgctgaacgtccgtaagctactatatatgcgtctcgcatttaaattcacccttcctgtactgattcataattagttgcgtagtggtttaccagtttctaagatatgagaaattctgtcatatgtttttttgttttgtaacaattctaaaaatctctctttttcaagcttttgcaaatatctttgattgatatatgtgttacgaggaatatctccaccgcctaatacttcagccactttcaacgtaatctcgtaatcatagtcactaatgaaatgacctatacgctgcgcatccaactgtccttctgccagcgctttaaagtctttgcctaaagcaatatactgtgcttttggtgttggaatatagtttgtttgcgattcataacgcgctcggtttaaagcaacttcgacacgtttttctgtatttaaaataattgtatctgtatttcttaaataaccatatctaaccgcttcatatgcgttagttgatactttggcaaagccgatttgcatgagtatatcagtaattgatttttgtttgtcatcatttttatggtttgtgcgaagaattctatctgataactctgcaagtccgccacctgcaggtaataatccgacacctgtctcaactagaccaatatatgattcactggcagcaacaacaatcggtgaatgtagtacaagctcacagccaccaccaagcgctttaccttgtacagctgtaacaatcggtttaagcgcatattttaatcttgcaaagacatgatgcagttgctcaacggctgcaccgacttcttctacaacgcgtccttcttcatgtgcttgtttcatttggaataagtttgcaccgacactgaaattaaatccacctgcgtaaatcaccatgctactatagtcttcacgctctaatgtatcgatagcttcaagtaagtcatcaaggaagctatttgaaataacattattcttactttgtagttttagtaataattgatctttatttgctacagacagattagaatctgatctatcccatagttcttgatcaacatattccgctacgggcgtaatgcgctcgatagtctcacctttcgcataaaatgattcattgcgttgctctatccaatcaggtaactgtcctacctcttctttcatacgtgctttcacacgttcgaaacccattaaatcccataattggaatggaccttgtttccagttaaagccccatacaagcgctctatcaatgtctttgaaagattctgccgctttaggtacattaattgctgaataatagaagttatttcttagcgtctcccataaaaacacaccagcatcatcttgtgcattaaaaatgacatctaaatttttagctaaatctttgccgaattgacctaatatttctaaatgtggtttctgtggctcaacataatcattttgtttagaatcaaagacgtaacgctttttgtttacctttttatagaatccttgttttgttttattgccgagtgcacctttttctgcaagtttttcggatagtttcacatcatggaagaatggttgttcttcaggtatttgttgtagtcctttaataactgcaatcgcgatatcaagacctaccaaatctgataaaccataagttcccatttttggacgcccgatactgcgacctgtcagtgcatctacttctgtgattgaaaatccttgtacttctgcgcgatacataatgtcgttcattgtttgtgtaccaacacggttcgctacaaatccaggtacatcgttagcaacgataacacctttacctaacacgtcttcagcaaaacgttgcacgcgatcgacaaccgatttcgaagtcttgctattaggaatcacttcaactaatttcatgatgcgtggtggattaaagaaatgcattccgaaaaatctttctttgtcactatcttcaaagacatctgcaattgatttgattggaatacctgacgtattcgtggcaaatattgcttcgtctttagccacgtctttcactttgttccaaatttgatgtttgatatcaacttcttcttttactgcttcaatatagatatctgcatcgtcttcccctgctaaatcctcattaaaattaccatacgtcaggttagaggcaaatgataaatcgaataattgtggacgtttaggatttgtgataatttcatatgctttttttgaaattttatttggttcgttctcgtcaatcacaatatctagtaattttacttttaatcctgcgttgactagtagcgcagcaatttgactccccattgttcctgcacctaacaccgttgcttttcttattgtcatactaaaccctccaaatttaatgttctgaattaatgcgttatatcgatgcgttcatctattagataaacgcggaatcacctgtcaatgcacggcctatgacaagtgcgttaatttcatgtgtaccttcatatgtgtagatagcttctgcatccgcaaagaatcgggcaatatcatactcaccagctagaataccatttccgccatgaacccctctgcccatcgcaacagactctcttagacgtaaggcattcatcatcttagctgtagaagtagccacttcatcatattctccatttgcctgcatgcgcgccaattgtgcacatgttgccatggcttgtgcaagatttccttgcatcatggctaatttctcttgaattaactggaatttactaatttctttaccaaattgtttacgcttcgttacataatctgttgtggcttttaacgcacctgccatagcgcctgtcgccatgtatgcaacgcctgcacgtgttgagtaaagtactcgtgcaatatctttaaagctattaatattttgtagacgttgttcttctttgacgactacgttgttcaaatgaatatttgtattcggtacgatacgtaaggcaattttattttcaatcacatcgatttcgacaccttcttgactgggttcgataataaagcctttaggtttgccagtttctacatcaactgcatagactggaatcacatctgctacattggcaccgccaatccatttcttctgtccattgataatccatttatcaccatctcgtttggcagtggtttcaagaccgccagcaacatcagagccatgttcgggttctgttaatgcgaaacaggtacgtaattcatgtgattgtaatttcggtaaatagtaagcttgttgttctttactgcctccaaaccaaaatgaattatgaccgagtccttggtgtacaccgagtaatgttgctagagatacatcaaatttcgctattgtatacgacataaagaattggaataattggctaggcgttttttcaccttcacgtccctcaaaaagcaatggattttggaagtaatttaattttcctaattcctcaaaatagtcttcaggctcagttgcatttaaccaatgttcattaacagaatcacgatatttttcttctaacatatcgttaagttgttttaataatttcacttctccttccgttaaatcttttgcgatacttaaaatatcttctgggtataatgctttgattacttcttcttttgttggcataatataaacctccatttattatgattgcgcttacatttacagttaaaaatttttccaacttttaaatacatcctgcttcaaatcgacgggttatgttaattcgtctttactttggtcttgcttttgcgctttgtcattcatatatttttgaatttctaatttatctggtttcgatgttgagtttaatggaatatgtgttaatttgagatacaatctcggtattttataacccgcaatatgttctcgcatatgtgcatctaatttctgttcaaaatctggatcatcttctgttaaaacaactgctgctgaaactgactccccgtatttcggactatcataaccgaccacaacaccttgagcgacaagtggatgttctgatagtaccctttcaacttcggaagggagaacattttcaccgccagtaataatcatctctttgcggcgatccactatataaacatctccatcttcatctatcttggctaaatctcctgttaagaaaaattcaccactaaatgctttggctgtttcttctggtttattccaataacctggcgtcacattattacctctaacgcccagttctccaatttctccaacttgtgcttcttcaaaattatcatcgaagatacgggtatctgtgaacatcacgggttgcccaatactcgctggtttacgttcgttattcgctgctgtattgacgctgacaagtggtgcctctgttaaaccataacctgtaataataggaattcccaagctcacaaattttttctgtacagttggtaaaggcgctgcccccccttgtatgaggaattcaatattggcaaagttctttaaatcaaagttgtcagcaaccaacatggcgtagtacatcgttgggatttgaattaagaaattcggttgatattgagccattaaatcatttaatgattcaccgttaaagtaccgttgtaataccaatgttccacctgccattaataatggaatcgttaagtcattaaatcctagtacatgaaacatcggtgttgaaataatggttgtataggatgcgtatactttgtatgtcaatgctgtgttaattggattatttacaaatgaatcataagagaacatcacgccttttggtaatcctgtcgtaccactcgtgtacattaaagatgctaaatcatcaccttcaacactaaccgttgtaaaaggacgatgatgggttggatcaacgatatcatcatatgtcttagaatcaatatccatatgaatcagttcatctgcgatgccttctaaacttgataaatgctttgctgaataaaatattaatttcacatcagaatcagcaatcacgctttcaatttcctgtgtctttaatcgccaattaatgggcaaatacacagcgcctagtttgaatgaagcaaacaataggtctaataacgcaacatcatttggtgaaaaaataccaacaacatcaccacgttgaaccccttgttcttgtagataattcgccaagttctctgctctaatatttaaatcttgatatgtccattctgtacctttgaatggatcaatgaccgctgcttttggttcgtcaaacgttgctcttgttttaatccagtcgtagttcatatttttctcccccttatttaaatacgataatccgacttaattgcttgagccaatcctccccagtgcgcttgatagatatcactgtgtgttagcttgatatcatcagaaagaatcggtctaaaagccatgttggctaaaatatcttgttctaaatctaaacctggtgcaatctcaataagttttaaacccttgtgcgttagttcaaatactgcacgttccgttacgaagtagacctcttgattaaatttaattgcattttcagcattgaaatccatactacccactttatccacaaattttgtagcgcgtccttgcgcttctacagttactttattattttcgtatgatagttgacccccaacaaccatcgctcctgaaaatacaattgtctttactgtctgactaatatctataaaaccaccgcagccgttcattttttctccaaacttagacacattgacattacccatctgatcaacttcagcaaagcttaaataggcaacatccaagccattgttatagataaaatcccaagtcatatcatgtctcattcgtgcactcaagttgtaattcataccaaagtgttctcgactactgattaatccaccaaatacgcccgtatcaatattaggctgaactaaatgattgacttgttcttccgataagacattagataattcattatttatgccaaaaccaatactgattacgtcaccctctaataaaaattgagccgcacgtctcaaaatcactttacgggtccctaatgctatatatggttctcgcatttctgtaatttgataatctcctgatagtgctggatcatattgcgtttgcatcacttgcctatgcagtttaggattcgtgtttacgacaacataatcgaccagttttcctggaataaatacatcattgggattaaagttaccattttgaacaactgctttaacttgtacaatcacttttccgcgattattatgtgttgctaatgctaagctatatccttcaccaagatgtgcttcatgtgtcatgtatatgttgccatccatgtccgcatatgtacctcttaatagcgcaatatctatgtctggaaagtcatactgtaaatatgtctgatgattaatttcaatcaacgatactaaatcttcggtcgtgcgctcattgactttaccacctgtatacctaggatctacattggtgttcaggccaattttagatatggtacctggtgattcttgcgtcttacttctgtaatgtgtggtaatcacgccttgaggtaagtaatacgcttcgatctcgttattgcgcattgcattgattgttgccggtgacgctgtgatgatacttgtgattaatcgcttaatcataccccttgttgtaaacgcatctaagtcatagctatcgccacgataatcactaatatcatttgctaacataaatgtaaaatctgtaaacgattgatcttcatcattatattcgactaacgttttgagtatctcagctggtaaattagccgttgataaggctgccagagctataacatcacctttattaatgatgcttgtcaattttgaaaatggaataattttcatataggtgtctcctatctttatttaatccaatctgttataagctttcccctttaaaaagcgctcctttttatgtaaatgtaagcccttacatgtaatataccattatttttgaaaattatgcaaaaattttaaattttacaaattaagattaactattttatggctttataacgggatttgagcagacataaattcaaattaatgttttaacacatcatgtctagttgactcatcatatttactttattaatgctgatgatttacagcatttctatttttttaaaatttagatttcgacattatattatttaatattttcgttacaaaaatattaattattttttatacatcgttgcttttataaacattttatatagttgtagcattcgcataagtttttatccttaacaatgtttaaaaatataaggaggggttattttggaatctaatgaacaaaaatttagcggaaaaaagctttcttctgtttttacttatagtcttattcttacagctatcgttgtattattaggtgctattttccctaatcagttcaataccatagggacaaacattacgggttggattacagaatacttcggttggtattatatgattatcgttgcattgatgatattcttctgtgtcttcttaatatttagccctattggtaaattaaagctcggaaaacctaacgacaagccaatcactataataacgctcaataagattaaatagcatattgtcaccaatgattgggattttctttatgtacaataaattcactaatatggcgtatgcaatacctgataaaagaaacggcgtaaggataactgtcactttttcaaaaaatgttaatgtaatcttgttcatattgattgctcctatatatctattagatgtttgtcattcaatttcacgataaatatctcacatacttcatttaaaaggcttgctttacgatacccaccgtccctacggtcacaatattatagaaatgataaacaaattcgcgcttatctattctattgctatctttgacccagtgtttcagtatggaaataccggcacctgatacataactcataaaataatcaaatggcatattgccaattttgtcatccgcattttatatgcacttaaatgactatatatcaggttatataacttttcttgcagcatggatgctttaccaagttcaaacacggttttgtaaaaagcgttttcataaaattaaaaacattttttatgattaactatttaaaaccgagtaaaagattaagtgtttgaatgacaccatcttcatcattatttttggcgattaaattcgcttctgctttcaactctgggtatgcattatccatcgctactttatatttagccgctttaaataaatcaatatcgttcataccatcaccaaatgcaatcgtttctgcaggactaatttgtaataaattttgaatacgacgtatcgttgtccctttattaacgcctaaatctgcaatatcaatccattcctcatcagatgtaataatataaacgtctgactcatagtgcttaatttgctgtgccgtcgctttacaatttgctttaggatcatgcactgaaattttcaaaaaatcttcctcaacttctgaaaaatcattaatataggtcacttcttgatacgagccatgtacaatttttttatctgcttcagaaatatgattgagtacatatgcactagatgccgtacaacctaaaatcgtttgcgtcggatcaatctcactaattgcttggataatttcttgccctttatgatgatcaatcgtggcattgtatataaaagatccattatatttaattctagtagcactatctccaacgataaatgtatcttgcgctaaatccccaacgatattttcaacgcgctcacattgtttaccagtacaaaacacaaaacgaatgtgtgcttgtgcacagtgttctttcaataattgaaatgattcactattgaattgactattactatttaaaaaagttccatccatatccgtcacaataagcttgatattcatcaaaaatcccctttattaatatatttatattaattgtatctatttatatattaagtgtatgtgaagacgttttcctagctcaaatcgtgtttagtattgccaatgaactcggacataaataccatttatacgtcattttatatcacaatgcttttaaaaaaataaggccctttcgtataatttaataaatactactaaactaaattaacgaggggccttatagataaaggttataatatcactcaacttacactaccaatagcaacttcaatgttaattactgtgatgctattgatcgattggatcgttttatttttatttgaactacttatttttgctgacgattcgttttcactagataaaatagataatacacaataccaatgataaaccaaatcaatgtatagagcttagcctgtccacttaagccccaaaatacagcgaatacacacacaaagataatgattggcatgattggataaaatggtagtttaaatgctggcattggcaaatcttttccttctctcttacgtaaggcatagataccaaccgtaacgaacataaatgctaccaaagcacctgcagaaattaattgtgcaaggaaaccaaacggaaagactgcaccaataactacagcaacaatagaaagtacaatcaatgcacgattcggtagatttttattgtttaattttccaagccaagacggaaggataccatcccgaccaaatgaatataataaacgggaaccagccaacatcataccgattaaggcagtaaacataccaataactgaaatggcttgaacaatgacagcaatcgtaccatagccacttgtacgtaatgcccatccaactggctctgcattatttttatatgaactatagtcaaacatgccgactagcacaagtgctacaacaataaagagcgttacggcaatcagtagcgaacctagtatacctcttggcattgttttctgtggattaatcgcttcaccagaattagctgctattgaatcaaaaccaatatatgctacgaagatgactgaacttccagcataaataccttgccatcctccaaatgcgcctgctgcagtttctttatattcaggtataaacggaacgtaatttccaagatctatcactgatacccctacaataataaataaaaaaatcgcgagtactttaagtactactaatatattttgaacacgtgctgtttcagaagttccacgagataataacaaggcagtaataacaacgacgactgctgctatcaaatctaagataccgccatccgtacccaatgagttagaaagtgaattcggtaatgaaatatggaaagggtctaacagccctcttaaattagcagaaaaacctgaagcaacgaaagatacggcaatcagatattcagcaattaatgcccatccaacaatccatccaaagaactctccaaataaaatactaatccaagtatatgcagaacccgcaaaaggcattaccgttgccatttcagcatagacaaatgcgaccattgcagcaacaatcgccgccactaaaaaagataagctaacagatggccccgtatgatctgctgatacaacaccaggcagtgtaaaaatcgctgtagaaacaattgtccctacacctagcgctaaaaagtcttttacacggagtgtacgttctagatgcgcatctttattttggtatcgagatacatcttcttttcgtaataagctttgtataagattcattttttacttctccttgctatttttaaaacaaacatgtttttaagtataatgatttttgaatctgatgtatatgctattgaagaaagaattaacttttcttgtattttcatatattttacaaagttatccgttaatcacctaccttatattcagggacttttttacatcacttattttcttggcattatctattgcacgggtactttaaagtgcgtacttacttttttaaagtatgccctttaaaataataattatcgtcataatacgaatttagataaaaaggagttttttgatgcaatatacaacatttaataatggacatacgatgcctcaactaggtttaggcgtttttagagtggaaaataatgatacggcaaaggatgctgttaaacatgcaattgttagtggctaccgtagtattgatgctgctttcgtatacggtaatgaagaaatggtcggtcagggcattcaagaaggcatccttgaagctggtattcaaagagaagatttgtttatcacatcaaaattatggttagaccactacggtaaagataacgttcaagtaggttatgaaacttcattaaagcttttaggcttagattacttagacctttatcttattcattggccaggtactgatcagtcgctaatgatagaaacatgggaaggcatggaagcattatataatgatggaaaagtcaaaaacattggtgtcagtaactttgatattgaacaccttgaaactttaaaagcacatacttctatcaaaccggtcatcgatcaagtggaattccatccataccttatacaacaatcattaagagattatcttgcttctgaatctattcaaatggaatcttggtctcctttaatgaatgctgaaattcttacagatgagacaatcgtcgcaatcgctaatgaaattggaaaatccccagctcaagtcgttatcagatggaatattgagcatggtgtggtgactatacctaaatcagtcacaccacatagaatcgaagaaaatataaatatatttgatttttcattaacgcaagcacaaatcgcacgcatcgatgcgttaaatcaagatcgtagaattggaccaaatcctttagagttcaacggatagtatactcattttccctcataaaagagccttagacatttaatgatgtctaaggctctttttcaattaagcagtagatgactgaattgaaaatacccttgtatcaagcttttttcaattctagtcatccttgccttgattgcataggtaggactacaaaatctctattagaaaattggatttttgtccctctccgttattttcaattctaagttgtctttgaaaaaagatgctattcattccgtaattaattaaaacttcctaaatcagcaactttaataaatgttttgatttgaggattatacatgtgttcaccctaattttttgaatttacaatagacttgtaggttatacttcgtacgcatttattttaacattaaaaaaataccaataaactttagcgtatcgttacttcattccaaagtttattggtatgctattctagcaggtcatacagtacgttatacgtttaatgcttcatgcgttgtaacacttctaactgtattacttttaatgcttcattatattcacgatttgtactttcttgtgcattaataattaataaatcaaccaattctacgtcgcttttctcactgacttcatgttcaaattgatgcaaatgttcttctgaggtcttcgcattttgcttttctatctgatagtattgatcggcccccaatccaccttcttcaatcatgacagaaataccatttgaacgtgtttcgtttactctttttactttaatacgtttattttcacggatagccatttgaatccctcctaacattcatgtgcatttgacaaacatcaacttcatttttatcacatctgctacttattggattgagatcaaatcacctagttgccgttaatcattatgtatagtcatattacatattcaatataaaacattattgtttcatatttcgatagtatctatagtgtaatattacatataagtaaatacaatctctttgctcacttttctataccctttttctaatatcattatccacgttaaagttgtatgcatacagcaataaagtttaacaaaatgtttataaatttaatatttataccacttctattgcactaaacctaattatataattgataatgattattattgtgaaagagtgatgtatatgttgaatttaaagactggcgttttagaaaaaaattacacagtaactgatttaaaaattagaaacaagcacatgcttcagcgtctccatacattaggtttaactcatggaaccaagataaaaatcaaacaaaaatgtttatttaagggaccctgcattttagaaataaatggtcaaaatttaagtatccgtggttgtgacgcatgtcagattttcaaggatatttgcatttgatgcaccgaacccctcactactcgcaatagtgaggttttttgtagatgtagttattgtatcctatttatatttacgtaaccaatgcgtaaataacgcaataatacaaacacttatgattgtgcacaaagatttccaatgagaacagcacttcctccaaattcaatttgacgaatgataaataggtgagactattataatactacttgttaacaaataaaatttcctattcctttaatcataatttatgtaaacaataagagaaatttcatatttaagataatcttatcatagctatagtgtacatcttttaacttcatttataattatgaattaaaaagtctacttctttcttggataaaacctcatattcacctctttttagctcatttgtagcgtgatcaaataaattaaaatttaaatcattacggtgttttaatgatttactacttctaataacaagaccaccataaccaccaaatttaatacattccgcaatgaacctaggtaatatatattcttgatagttatttgaggttttaggccttagtaatatatctaaaagatgactatcaattttagtaaaatcagctagcttcaaattattattatataagtactgctgaacatggtaatactttgaatgttcgtcatacacttctaataacgaaatttctttttgattagcagtatatagtagagattggccataagaatcaaagcgtccacctcttgaaatatcataaggtgtaatactcatttgctcatatgaaaatggaaatttatcctttttagttctggttttataaagtgttagttcttctgcagtttcgaataaacctatattaaaactttggatttcatcataaattttcttgccaattttatgatttaaaataagcattggagtattttgaatatacctaataaattcaaaaagttctttttcgctaaatcctaaattttcatcataaagagcataagcgtcagaaatactatttatgtcagtatattcatcgctatcttttctttttaaatatgtactatggcctctaattctagttgctgtaaagttctctttgaatcccactctaccaagtaaatcgaaatgatttttgggaactattagtttgttaatatcaatagttttattaaagttagtgtaaaaagcagatgacggtatcttataattaaagtttttgatggtactgaaataagaaggtttattataatttaaactttttaaaattttatcagttaccgaataattatatgtattgtataaattgattttgccaattatattattgaatttagttgtatttgaatacgctttattaatagcgttattagctaatagtgaaggatttttaataggataagtataattggtagaaattaatgaatttgtttttttattaagtaaccctattgcattaagcacagatgtattgtaaacggtaggattaataacgttattgttgaatttattggtatttaaaattgctttattaatagcactactagttaatagtgaagagttatttattgaattgatataactagtataaattggtttgtttcttttcttattaattggtgatatatcatacacattcgtttttttaggtataaagtcaataaaaaataaaaatttattattaagtatatcttcataattttttatacaatattggaaaaaagttttcataattcatatttaatgatcacacctttcaatgctattaaagctattatattagtattttatacaattataagcaaataaattaatattttgaaaaaattaaaacacatgcataatattgcatgtgtttttgttacgcttataaaggttatataaaatctttcacttaaataattaagtatatatttctactatcccattccctttatattaaatatttatatttcacaatttcgattttgcattcctacccactatgatgttataattcaattaacgaaggttatatgcatataagcaccaatcccctcactatttgcggtagtgaggggattttttgatgcggcttaacgtcgccttctatttattgcgtttactactaagccaataagtaaaatacgcaactgcacagccactaatgactggtgcaatgatgtgaacgaagatcataagcatattaaacacctccttccgccgaaaatatcgcccgccggaagttaaggcgactctattattataccacctgctaatgtatcagcgtacctacttaaactacgttgaagcatattaaagaatgcctcatttccaacacttttactaccaaaaactataaacttaaaattgattaactccctacttttaccatccccaaataataaaaagaagctaaacaacgttgtgttgtctaacttcttaattaatatataatctttagctcgaaagacattacctaagacgtcccgctatcttatccgtttttatttcttaacaaaagcgattatggcatctcttaaaaattgagcaccaccttctacatatttatcataatatctagaaaatcgttcatcagccacgtacatttcagctaaacctgcatgtgcttctttagtataatcagaccacgtatacattaaccatgctttatgtttcgcagctaacatttgcgcaacttcagatgatggatctccggtttgatatgctttgggtaataactcaataatttcattctctaatttacgccattcattatattccgcttcagtcatatctttaaattttgcgttactttcatctacagtcttgtcaccgtatttttctctgatttcagtaccatattcatgttcgttttcttgaattgcttgtactttcaatccttcaaatttttctttatcttgcatagcaatttctcctttcgtatgcgcaatggttttttctacggtttctataattttgtcgaggtgtgcacgtttttgttttaaattttcagaatgattttctaaagcagttacttaatcaaatccaggttgttggacgatgttttttatttcttcaatacttacatctaactctcgatagaatataatttgttgtagcatgtctacttgttctttgccatatatccggtatcctgatgaattgattctatctggtttaagcaatccaatttgatcataatagcgcaatgtgcgaggacttacacctgatagtttagctaattgacttacggtatattccataattcacctcctgacaaataacacgttacacccttacgttacgtcaatctcaaggagaaatttctaatttttaaaaatcgaactatcatccacatgttttatatcatacttatggcttaaatagatatatactaattaatacaactgcgataaaaatacccacgactaatacgaaactatatatcgaagtaattaaatttcttaaattagatgaatgtacttcatttggatcctttccattcataaaagctacgatacgatcataggtttgtatttgatatgatttcttaaaacgctctaccttaaatgatgcaataataccagtacctaataataatatttctagtattaaaccaaatgctccccagtaatacatcgcaggtccaattaatattcctgctatcaacatcggccatatcattaaatgcgacgatagattaaatctgctttctttcaacttacgctccataatctccacgtctcctttgactaagtcatctaaagaaacatcaaacaatgaacttagcatcaataaattatgaatatctggatagcttttatcattctcccaattagaaattgtttgtcgtgaaacatataatttttcagctaaactttcttgagataaataatcgcgttgccgataatatttaatttgatgttctaaattcattgttctgctcctttaagtagagattatgatgattttcaatataagactatcaaagttcgttgacatctgcatcattttgccatgcttaaatatttttacatactgttgtcacagtgaatcaagactgccctttagacataccaaaggataggaaacttgttatattagcaagctcctatcctttaatataatattatgttgtttgttgttgcttataagatatttgataatccaattcaaatttagcacctgctgtgatttttttgtattgataactgaaataagctacccataaaatcgttagcacaaaggctatgatataacttaaattgaggtctaaacccaatccaattttctgacttaaaatataagtaaaaatattccatgtcataaacacagctgggattgctgccacccagaaattctttttcgcaatcaatagatacatcgcacctacccatagtgcaacaaccgctgttgtttgatttgcccaagagaaatatctccatagaatcgtgaaatcaacttgtgtaagaccaaagctaataacgaacaatggtactgctacaataatacgtttaacaatatttcgctgaccatagtttaaataatctgcaataatcattctagcgcttctgaaagacgtatccccgctagtgattggtaaaatgataacacctaacacggcgatcgtaccgaatacagagcccagtaatagatgtgatgcctggctcactactaatgcagcttcaccacgtgctaagacatcattcaaaccattatagccattaaataaactcatacccgctgcagcccaaatcattgctatgataccttccgcaatcatcataccgtaaaagatgaatctaccattctgttctttatttgttgttctagaaataatcggtgtctgtgtcgcatgaaatccagacaatgcaccacaagttattgtaaagaatagtaatggaaatactggcgccccatcaggatgcatattactaaaatttagttctggaataggtgcccctgtttgaataagacggaaacctatacctaccgcactcactaataataatgcgccaaacactggataaattctaccaatgatcttatctataggtaaaattgtagataatgtataatacacaaatataacaaaaataataatacccagtgcaatgcgtccatccattaaattatgtaatagaagtgccggactagtcacaaatacagttcctgttaagagtaataataaaatagaaaatatattaacaaagtgcttcatcacttgacctaaaaatttccctgcaagttctggtaagtgcgcccctttatttctaattgaaatcataccggtcagataatcatgtactgcccctgcaaagatacagcctacaacaatccaaataaatgctatgggtccataaagtgctcccataataggtccaaatataggtccaacacctgcgatatttaacaattgtataagcgagttagatcgcgtcttcatcggtaaataatcaacatcatctctttgatcatacgctggtgtgggtcgctctttatttggtccaaacattttgtctatgtattttccataagtgaaataacccaccaccaataaaataatagctacaataaaagtaatcatgttaccattcccccttagataacttgaaagcgttttcttaatttaaccataaatggtaaaattccacaatattgcatttgttttttattctaattttataaatatgtatttttgattttattaaaccttaattaatacctaatcatatatattagtacaaaaaatagaggcttacctcgtcttatcataggtaaacctctatcactattaatgtttaaataattttattttaatttcataataatcatcgtaatctttggcttgatgctcatatttaataccgcttttttcgatagaatctagacttttaccaactgcttcacgcgcatcggtcaaatctttttcaaattcaaatctttgtgcttttactttttcagggcctatcttttgtttcacacgtgcttctgtttgttttacatttaatttttgacttataaccgtttcaactaatatttcttgatcttcttctgataaactgagcatcgcgcgcgcatggcgttccgtaattttactttcacgtaaacgttccaatactttaggcgccaattttaataaacgtagtttatttgcaataaagctctgacttttaccgacacttttagctaattcgctctgtgtggtatccccgatttctagtaactttttataagcttcggcttcttcaacaacagataaattttcacgttgaatattttcaatgagtgcgactacagcagtttcctcatcatctaaatatctaataattacatcagcgtgcgttttacttagactctgtaaagctctaaatctacgttcgcctgctataatctcaaacatatcctcttcaattggacgtacgacaatcggttgtagcaaaccatgttcttctatagattctgcgagttctttaatcttatttggctcaaatacttgtcttggttgataacggtttggcacaatacgttccgtatgaatagattcaacgctattattataatcctcttcaatataaccaacgatgtcatctttgttctttaaaccaaataatttagaaaaaggttttttcatttactatgcgctccctctaaattaattgtattgaattttactatttttcaagtaacggtgatttatttggtgttcctggttttctaggatatttcttaggtgtttgactacgtttgtctatgataatcatctgtctttcacctgcatcttcaggtagttcatatgaaattgtatcaagtactttaccacctaatacgccaataccgaaacgtgcttcttccaattcttcttcacctttagacgatttcagtgctatgaagtgaccaccttttttaactaatggcaagcatagctcacttaatacagaaagtctagcaactgcacgtgctgtaacgatatcgtaagacgccctgtagtctcccttaccataagtttcggcacgatcatgtacaaaactcacattgtctaactctaaagcttccgctaattgatttaaaaagtgaatgcgtttattcaatgaatctacaattgtaactttcaaattcggaaaaatgattttcaaaggaatgctaggaaaaccagcaccagcacccacgtcacatatcgttaattctttagttaaatccgtataaaaacttgtcgcaattgaatcataaaaatgcttcaaatatacttcatgttcttcagtaatacttgttaaattcattttttcattccattcaacaagcatttgataatacgtttgaaactgttgttgttgtttatctgaaagttctattccatgtgtactcagttgctgtgttaaccatgctacactcatcttagttattcaccctttggattttaccttgttcaagatatacaagtaaaattgaaatatcggctggattgacaccagatatacgtgaagcttgtgcaatattgagtggtttaacttctgctaatttctcacgagcttcagtcgctaaactatctaccttactataatctagatcttctggaattttcttctcttccatacgtttaactttttcaacttgttgtaaggatttattgatataaccttcatatttagtttgaatttcaacttgttcttcaacgtctgaaggcaattgatgtgattcatctaaaatttctagaattaaatcgtatgtcatttcaggacgacgtaataattctaaagcaaggataccgtctttcaaacgagagccgccttgagcctcaataatctcttgcacacggtcgtttggtttgacacgaataccatttagacgttcttgttctgctttaatcatagcgcgtttttcattaaaacgtgcatagcgttcctctgaaatcatacctaattcataacctaagtctgttagacgtaaatcagcgttgtcatgtcttaataatagacggtattcagcacgagaagtcaataaacgataaggttcgtttgtacctttagtaattaaatcatcaattaatacaccaatataggcatctgaacgacttaagataacttcatccttaccttgaacacgtgctgctgcattgataccagccatgataccttgtccagccgcttcttcataacctgatgtcccattaatttggccagcagtgtataagtttttaatttttttagtttcaagtgttggccataattgtgttggaactaacgcatcatactcgatggcatagcctgcacgcatcatatctgctttttctaaaccaggaatcgtttctaacatttgacgttgcacatgttcaggtaaacttgttgatagaccttggacataaacttcgtttgtatttctaccttctggttctaagaatagttgatggcgtggtttgtcattgaatcttacaaatttatcttcaatggatgggcaatatcttggaccagtacctttgatcatacctgaatacattgctgataaatgtaagttatcatcaatcacttggtgtgtatcaccatttgtataagttaaccaacatggcaattgatctaaaatatattctgttgtttcaaagctgaaggctcttccaacatcatcaccaggttggatttccgttttagaataatcaatcgttttggcatttacacgtggtggtgtacctgttttaaatctaacgacttcaaaacctaatcctcttaagttatcagctagagagattgaaggtaattgatggtttggaccacttgaatacttcatgttacctaaaatgatttcaccgcgtaaaaatgtacctgttgtaataataactgcctctgaccagtattctgtaccgatatttgttcttacacctttaatgacatcatcttcaataatgaggtcatctaccataccttgcatgatatcaaggtttgcttcatcttcaattacttttttcatttcttgttgatacaagactttatctgcttgagcacgtaatgctcttactgctggacctttaccagtatttaacatacgcatttgaatgtgcgttttatcaatggttttcgccatttgaccacctaatgcatcgatttcacgtacgacaataccttttgctggaccacccactgatgggttacacggcataaaagcaatattatctaggttaatcgtcaacattaacgttttggcaccacgacgtgctgaagctaatccagcttcaataccagcatgtccggctcctattactatcacatcatattcttgagccattattatttcctccttattattttcctaaacagaattgactaaataactggtcaattaattcatcacttgcagattcaccgataatctcacctaaaatttcccatgttcttgttaagtcgatttgtaccatatccatcggtacacctgattctgctgcatctattgcatcttgaatggtatttcttgcttgtttcaataatgaaatatgtcttgaattagaaacataagtcatatcttggttttgaacatcgccaccaaagaataaatctctaatttgaatttctaattgatcaatgccttcttgtttgagcatcgatgtctgaatcaatggcatatcgccaatcatatctttgacttcatcaagatctaaatgcttgtctaaatccatcttattaacaataacaatcgcatcttcattcttaatcacttcatacaacttacgatcttcatctgttaatctttcattataattaagtacaaatagtattaaatccgcttcgcctaaagcttttcttgatcgctctacaccaatacgttcgacgatatcttctgtatcacgtatacctgctgtatcgacaagtcttaatggtacaccacggacattaacatattcttctaaagtatctcttgtagtaccaggcacttcagtcacaatggctttattatcttgaatgaggttattgagcatcgatgatttaccgacattaggcttacctacgataaccgtagaaagcccttctctcataatcttcccttgtgtacctgtatcgagtaatttattaatttctgttttaatttcatttgatttccctaataatacctctgtagtcgcatcttcgacatcatcatattctgggtaatctatgttcacttcgacttgagcaaggatttcgagaatggattgtcgctgtcgttttatcatatcacttaaacgaccttctatttgattcattgcaactttagacgcacgatcggttttagaacgaataaaatccatcactgcttctgcttgagataagtctattctgccatttaagaaagcacgctttgtatattcacctggatcagccatacgggctccataggtcatcgtcaattctagtattctattaattgttaaaatgccaccatgacagttaatttcgacaatatcttcacgtgtgaacgtctttggtgcacgtagtacggaaaccataacttcttccaccacttcgttcgattcaggatcaataatatgaccatagttaatcgtgtgagacgttacatcttcaagtctttctttacctttataaagtttatctgcaatatctacagcatctacacctgataaacgtacaataccaattgcaccttcacccattggtgttgatatactcgttatcgtatctaaatccatcatccatctcgcctccttttcgacttcatttttatcattataatattgtaaatagtttcctattaaaaagcgagtatcttgtttaccattttgtaaaagttagtcttcggtttgtatgaggtaagacttacagttgtctaacatcttcttccccttccctacttaaacacgcttattaaatacctttgctattttgagtacatgttccaaactcgcttgtatttgtaatgtgtccatatcttttgctggttgcctcgctatcacaataatatccattggtaagatatcttctttatggattttaaaattttcgcgaatggcacgtttaattctatttcttacgactgcattacctaactttttagaaacactaatacctaagcgaaaatgattcaacgctttattaggttgcgtatatattacaaattgtctatttgcaactgatttccctttcttataaataaactggaaatcactatttttttttattcggtaagctttctccaccaagcatcactcacttatcatatcttttcaatacatataccaacgaaccttatgtttcgttctattcattcgttatcataaattaatagtagaaatctacgtaatttttagcaattttacttcactaaaaccaaaaaaaagaccactgatgagtcagtgatcttatgctgataatactttacggcctttacgacgacgacgcgccaacactttacgaccattttttgtgctcatgcgttttctgaaaccatgaactttactatgtttacgtttatttggttgataagtacgttttaccatgcaaaaacacctccatctttattcggttctatactattataatagataaattaatatacgcttctgcttcaagtcttgatttaactgttattaatttctagtcataattcaagcaactactacaatataacaaaatctattttataaagcaagtctcaatttaagtgactgatttaaaatatatgagttacatcatacacttcctttattatattacaatcaagcatttactatgtttcactccaaaagtgcttctgtctatgcagatactccccttttgcagcacccctgcatttatccattttgtgttatacatttttcatacaatctttataaattatttcccaaacccacaaacaccttaaaatttggtatactgtctattacttaaagttatccacttatacacaacgctatacctcaaatttgtggataagtataatgttattcacagagttcctcagcattaagaacatatc

SEQ ID NO: 48 - DNA, 92619 bp, Staphylococcus saprophyticus
  misc_feature (42156)..(42156): n is a, c, g, or t
  misc_feature (42158)..(42158): n is a, c, g, or t
  misc_feature (86605)..(86605): n is a, c, g, or t
  misc_feature (86634)..(86634): n is a, c, g, or t
ttattatgtcagaacaagaaatttgggacaaatttctaaccttggctcaagaaaaagtaagtagtgcaagctaccaaacatttcttaaagatacaaaattgtttaaactgcagaatgaacaagcgattgtagttactgatgacgattttgttgctaattggttaaagatgaattacgcagaaattattaaagctgctttatatgaagcaattggtcatgagatagcaccagtcttttatactgaagaagagctaaaaagcttacatacaagtgagcaaaaagaagaaaatcaaccagaacaaccagccaaaaagtatacgccaggcgttgatgaagctgtcattggcggtgaacagttcaatacacataatacgtttgaaacatttgtcattggaccaggtaatagattccctcatgctgcaagtcttgcagtggcagaagcaccagctaaagcgtataatccattatttatttatggtggtgttggtttaggtaagacccatctaatgcatgcgattggtcattatgtattggataacaatccagacgctaaagttatttatacgtctagtgaaaaatttacaaatgaatttattaagtctattcgtgataataaaactgaacgttttagggaaaaataccgtaatatcgacgttttattaattgatgatattcaatttattcaaaataaagaacaaactcaagaagaatttttccatacatttaatgaattacatcaagcaaataagcaaattgtaatttctagtgatcgacctccaaaagaaattgctaaactagaagatcgtttacgttcacgtttcgaatggggattaatcgtagatattacgccgcctgattatgaaacaagaatggcgattttacagaagaaaattggcgaagaaaatcttaacattccaactgaggcgcttacttacatcgctaatcaaattcagtctaatattcgtgaacttgaaggtgcattaacacgtgtcttagcattttcaaaattacagggacaacccattacgactgagttaacagctgaagcacttaaagatattattcaagcacctaaatctaaaaaaatcacgatacaagatattcagaaaattgttggtcagtattatagtgtaagaattgaagattttagcgctaaaaaacgaacaaaatccatcgcttatccgcgtcaaattgcaatgtacttatcacgtgagttaaccgatttttcattaccaaaaattggtgaagagtttggcggtcgtgatcatacaacggttattcatgcacatgaaaaaatagttaaagatatacaaaatgatccaatttttaaacaagaagttgaaaatttagaaaaagaaataagaaaccaataaaataaactgtactataacagattaatcgtaggtattttgaggaatagttaatagaggaattataaacgttattgtggataatgttaaaaagtcatacacacagtgcacaagttatccacagtctttaatcgacgtcactgttcactaaaattaacttatcccctaatccacaagccctactactattactactgtcttaaaacctatataatttaatatataaacgactggaaggagtttaataaagatggaattcacaataagaagagattattttattaatcaattaaatgacacacttaaggccatctcaccaagaacaacattacctatcttaactggtatcaaaattgaagttaaaaacaacgaagttatactaactggttctgattcagaaatctcaatcgaaatcactattcctaaacaagtcgatggtgaaaatattattgatattgctgaaaccggatcagtcgtgcttcctggtcgtttcttcgtagacattataaaaaaattaccaggtaaagaagttaaactttctacaaatgaacagttccaaacacttattacatctggacattctgaatttaacttaagtggtttagacccagatcaatacccgttattgccacaagtttctcgtgatgatgcgatccaattatcagttaaagtgtttaaaaacgttatcgcacagactaatttcgcagtgtccacctcagaaacacgcccagtacttactggtgtcaactggcttatacaagaaaatgaattaatatgcacagctactgactcgcaccgcttggctgtaagaaaggtagcattagaagatgactcagaaaataaaaatgtcatcattcctggtaaagcattatctgagttaaataagattatgtcagacagtgaagaagacatcgatattttctttgcttcaaatcaagtgttattcaaagtgggtaacgtaaactttatttcacgtttattagaaggtcattatcctgatacatctcgtttattcccagagaattacgaaattaaattaggaattgataatggtgaattctatcatgccatcgatcgtgcatcattattagcacgtgaaggcggcaataatgtcattaaattaagtacaggtaatgaacttgtagaattatcttcaacatcaccagaaattggtacggtaaaagaagatgttaaagcaagtaatgtagatggtggcaacctaaaaatttcattcaactcaaaatatatgatggatgctttaaaagccattgataacgatgaagtggaagtagaatttttcggtacaatgaaaccatttattttaaaaccaaaagatgatgattcagttacacaactcatcttaccgattagaacgtattaatcgtattgttaaatagatcaacgcaataacttttctcataaaagtgcaacttaacaggaacaagcctttgaaatcttagtgatttctggtttgttcctgtttttatttgaaaaaagagtctgagtttaaaagcagatactaagagataattagaaatttgctaatgttattaattaatttcatgattaaagacatttaaagggcaaatataagcattttgaacattttcttaggggaaaatgcttaaaagtaataaaagtgtcttaaaacagctctaaatgcaaaataaatatagtccgtatatcatacataaatttttaagcagattaaggtatttagtgaaaattaatattatttgtaaagaatgcccatataatgtatttatttttgatataatatgacattatgaaacaacgttaaaaataactttgaaactaattatttaaaaatagttaaaataagttaaaagaaatcgcttactcactgtattttgcatgaaattttccgcaaaaaaaggtataatatataagtgagcttaaaagaaatggagtgattgatttggttgaagaggtaattgttgatggagacattactttagggcaatttctaaagacagaaggtattatcgaatctggcggacaagcaaaatggttcttacaagattttgatgtcatgatcaatgatgagcgtgaaacgcgtcgcggtaagaaattaaatcatcgagatagcattgtcataccagaagtcggttcatttttgatattacatcaaggtgaagaatgaaattaaagacactccagttacaaaattatcgtaattatgagtcgatttccttaaattgtcatcccgatgtcaatatattgattggtgaaaatgcccaagggaagactaatttattagaatctatttatacgttagcactagctaaaagtcacagaacgtctaatgacaaagaactcatacgtttcgatagcgactatgctaaaatagagggtgaccttagttatagatatggtgagatgcctttaacgatgtacatcactaaaaaaggtaaacaagtcaaaatcaatcacttagaacaaagtagactgacccagtatattgggcacttgaacgtcgttttgtttgcgcctgaggatttaaatattgtcaaaggatcaccgcagattagacgtagatttatagatatggaacttggacaaatctcagcagtatatttaaatgatttgtcacagtatcaacgtattttaaaacaaaagaataattatttgaagcaactgcaatatggacaaaagacagacagcaccatgcttgaagtcttaaaccaacaatttgcagaatacgcactcaaaattacgctaagacgtgaacattttattaatgaacttgaatcactagcgaaacctatccattctgggattacaaatgaacgtgaaacattgtctttaaactatttacctagtattaaactagaaaataaagataaaagtgagacggaacgcttagaggaagtcttaacgatacttaatgacaatatggaacgagaaaaagatcgaggtgtgtgtttatacggacctcacagagatgatttaggttttaatgtgaatggaatggacgctcagacttatggctcgcaaggtcaacaaagaactactgcactatcaatcaaactcgctgaaattgagttaatgaatattgaagtaggtgagtatccaattctattgctagatgatgtattaagtgagttagatgattcacgtcaatctcatttattgagcactattcaacataaagtgcagacttttgttactacgacatccgtagacggtatagaacatgaaattatgaaaaacgctaaactttatcgcattaatcagggcgaaattataaagtaatggaaagtgaaggtggaagcagtgtcagatgtgaacaacacggaagattatggtgctggacagattcaggtattggaaggtctagaagcggtacgtaaaagaccaggtatgtatattggttcaacttcagaaaaaggtttacaccatcttgtatgggaaattgtcgataacagtatcgatgaagcacttgcaggttatgccgacacaattgaagttgtaatcgaaaaagataattggattaaggtaacggataatggccgtggtatacctgttggcattcaagaaaaaatgggacgtcctgcagttgaggttattctaactgtattacatgctggtggtaaattcggtggcggcggttataaagtttctggtggtttacatggtgtaggttcatcagtagtaaacgcgttatcagaagatcttgaagtatacgtgtataaagaccgcaaagtttatcatcaaggttataaaaaaggtgtacctcaatttgacttgaaagtcattgaagaaacagatgatgataatacaggtacagtcattcgttttaaagcggattctgaaattttcacagaaacgacaacatatcattatgaaacattacaacaacgtacaagagagcttgcgttcctaaataaaggtatttcaattactttaagagatgaacgtggtgaagaagttcgtgaagacacatatcactatgaaggtggtattaaatcttatgttgaaatgctaaatgaaaacaaacagcctttacatgaagaacctatttacgtgcatcaaagcaaagatgatattgaagttgaaattgctttacaatacaacaaaggttttgcaacaaacttgttgacgtatgcgaataatattcacacatatgaaggtggtacacacgaagaaggtttcaaacgtgcactatctcgtgtacttaatagttacggattaaatagtaaaattatcaaagaagataaagaaagactttcaggtgaagacacacgtgaaggtttgacagcaattgtttcaattaagcacggtgatccacaatttgaaggacaaacaaaaacaaaattaggtaactctgaagtacgtcaaatcgttgataaactattctctgagttatttgagcgtttcttatatgaacatcctcaagtaggccgtattgtagttgaaaaaggtatcatggcttcacacgcacgccttgctgcgaaaaaagcacgtgaagttacgcgccgtaaatcagcattagaaatatcaagcttacctggtaaattggcggattgctctagtaaagacccatcacgtagtgaaatctttatcgtcgagggtgactctgccggtgggtctacaaaatccggtcgtgattcagaaacacaagcgatattgccattgcgtggtaaaatcttgaacgttgaaaaagcacgtttagatagaattttaaataataacgagattcgttcgatgattacggcatttggtacgggtattggtggcgaatttgatttaagtaaggcacgctatcataagattgtccttatgacagatgctgatgtcgatggtgcacatattagaacattgttattaacattcttctatcgctttatgagaccattgttagaagcaggatatgtgtatattgcacaaccacctttattcaaactgacacaaggtaaacaaaaatactatgtctttaatgaacgtgaattagaaaaacttaaagctgagttagaaccaacgccaaaatggtcgatttcacgttacaaaggtcttggtgaaatgaatgcggatcaattatgggaaactaccatgaatccagaaaatagagccatgttacaagtatcattggatgatgcgattgaagcggaccaagtcttcgaaatgttaatgggcgacgttgtagagaaccgtagacagtttattgaagataatgcagtctatgccaacttagatttctaatacgatgaactgaatttttgaaggaggatatcttgatggctgaattacctgaatcaagaattaatgaacgaaatataacgaatgagatgcgcgagtcattcttagactatgcaatgagtgttattgtctcacgtgctttacctgatgttagagatggtttgaaaccagtacatcgacgcatattgtatggattacatgaacaaggtatgacaccagacaagtcatacaagaaatctgcgcgtattgttggggacgtaatgggtaaatatcacccacatggtgactcatcaatttatgaagcaatggttagaatggcacaagacttcagctatcgatatcctttagttgatggacaaggtaactttggttctatggatggcgacggtgcggctgcgatgcgttatacagaagcacgtatgtctaagattacacttgaattacttagagatttaaataaagataccattgattttatcgataactatgatggtaatgaaagagagccgtcagtcttacctgctagattccctaacttattagttaatggtgcatcaggtatcgctgttggtatggctacaaatattccaccacataatttaacagaggtcatcaacggtattttaagtttaagttataatcccgatattaccattgctgaattgatggaagatatacaagggccagacttcccgactgcaggtattatccttggaaagagtgggattcgtcgtgcatttgaaacaggtcgaggatcaatacaattgcgctctcgtgcagaaatagaagaacgtggtggcggtcgtcaacgtattgttgttacagaagtaccgtaccaagttaacaaagcacgtatgatagaaaagattgctgaattagcgcgtgataagaaaatagacggtatcacagacttacgcgatgaaacaagtttacgtacaggtgtccgtgtagtaatcgatatccgtaaagatgccaacgcgagtgttgtcttaaataacttatacaaacaaacaccattacaaacatcatttggtgtaaacatgattgccttagttaatggcagaccaaaacttatttcacttaaagatgccttagttgaatacttagaacatcaaaaagtcgttgtaagaagacgtaccgaatataatttgaaaaaagctttagatcgtgcacatatattagaaggtttgagaattgcgcttgatcatattgatgaaattatcagagttattcgtgaatcagataacgataagattgccatggcaagtttacaagaacaatttaaattatctgaacgtcaagcacaagcgattttagatatgcgtttaagacgtttaactggtttagaaagagataagattgaagctgaatataatgaactaattgcttatattgaagaattgaaatctatccttgcagatgaagaaaaattattacaaattgttcgtgatgaattgattgatgtccgtgagcgttatggtgatgaacgtaagactgaaatccaacttggtggtttagatgacattgaagatgaggatttaattccagaagaacaaattgtgattacgttaagtcataataactacatcaaacgattaccagtttcaacttatagagcacaacaccgtggtggtcgtggtgttcaaggtatgaatacgctagaagaagactttgtaagtcaacttgtgacgttaagtacacatgacaacgtgctattctttacgaataaaggtcgtgtctataaacttaaaggctatgaagtgccagagctttctcgtcagtctaaaggtattccagtagttaacgcaattgagttagacaatgacgaatcgattagtacgatgattgctgttaaagatttagaaagtgaagaagattatttagtctttgctactcaaaaaggtagagtgaaacgttctgccctaagtaacttctcacatattaataaaaacggtaaaattgcgattagtttcaaacaggatgacgaattgattgcagtacgtctaactgatggtgaaactgatattctaataggtacatcgcacgcttcattaattcgcttccctgaaactgcattgcgtccacttggccgtaccgcggcgggtgtgaaaggtattacacttagagaagacgataaagtagtcggtttagatgttacaaaagccgaaagcgatgatgaaatactcgtcgtgactgaaaatggttacggtaaacgtacaccagttgaagattacagattatcaaaccgtggtggtaaaggtattaaaacagcgactatcacagaacgtaatggtaatgtagtttgtatcacatcagtgactggtgaagaagacttgatggttgttacaaactctggcgtgattatccgtattgatgtagaggatatttcacaaaacggccgtgcagcacaaggtgtgagattgattaaattaggtgaaaatcaattcgtatctacagtagctaaagtaaatgaggaagatgaagctgaaacagaaactgaagcaattgcctccgattcagaaaatactgatgcaactgaacaaatggcacaagattcacaacaaggtgaagctgtgatagaggacgatgcaccaggcaacgccattcatacagaagttgaagatagtgatgtatcagatgatgatgatcgtcaagaagtacgacaagactttatggaccgtgtgaatgaagatattgataatgcggacaacgaagataacgaagataacgaagaagagtaattttatgcgataatagtcattataaaaaagacctacctcaatgaggtaggtcttttttggcttaattttctaaagctttcatagcatgaggtatttcactgattagtctggatggcggcacgacatacattttttctgctaactgttctccaatataactatgcgtatacgtagcacttgtaacggcttcttctgtgtcgttgaattggccgacaaagcttgtaatcataccagataaagtatcacccataccacctgtagccattgctggtgtccctattggcagtttgtagtctttacctctgaaatagatttcagttccgtgcatttttaagacaatggttgcaccaatgcgatctgcggcttcacgattacgttcatacgtttgttcctctataggaataccacttaaacgttcccactctttttggtgaggcgtaaagataaccttgcacgtaggaatgtctggtttcaatttactaaaaattgtaatagcatccccatctacaattaatttttgatgtggttgaatattttgtaataggaaagtaatggcattattgcctttaaaatcacaaccgagtcctggcccgattaagatacaatccgtgttctcaatcatttttgttaacattttagtatcgttaatatcaatcaccatggcctctggacaacgtgaatgtaaagcggcatgatttgttggatgtgtagctacagtgattaatccgctaccactataaacacacgctcgagctgcaagcatgattgcaccacctaagttcgcattgcccccaattaaaagaattctcccataatcacctttatgtgtttcatctttacgttttggaatgcttacttgtgataaagtttccattttgaaacctccttttaaacatttagcgttaatttaatacgttgacttgaaaaagataagcatctgcttaaaatgataaatgttaaagttggctatcttatattctctatatcatagaatgttaaaaccattttcttttaagttacttatatcttattttcatgtgctcatttataaatacaataagaaatattatacctggtttcgagattagtcaataggcaaagtcgtaaagaaaatattaattttagaaaacataattttgatacgactttatcccattaaatcagtaatttaataccatattacggatatggtcaatcctattgttcgtgtgaaaatgtaagcgtatactcgaattaattgaacaaaatagataagcaaggagatggggaaatgacattacaacttaatggtgaaatgctaacaatcaatgatattaaaacgttcttaaataaggaagataccgttgaagtaacacaagaagcactggaacgcgtaaagaaaagtagacaaacggtggaacatattatagaaaacaaagaaacaatctatggtattacaactggatttggattatttagtgatgtgcgaattgataaagatgaatacaatcaattacaagtaaatttaattcgatcacatgcttgtggtgttgggaaaccattttcagaagaagttgctttagtaatgatggtcttacgattaaatactttgttgaaaggtcattctggtacgacagtcgcgttagtagagcaacttgtttattatatcaataacagaattgtaccagtgattccacagcaaggatctttaggcgcatcaggggacctagcaccattatctcatttagcattagctttaattggtgaaggcaatgtattttttaaaggtgaagaagtagacagccggtatgtcttaaatcaattaaatcgtaacccaatacaattacaagctaaagagggacttgcactcattaatggcacgcaagcgatgactgcacaaggtgtgattaattatattgaagcggaagccttaggttaccaagcagaatggattgctgctctaacacatcaagcattaaatggtattacagatgcttataatgaaaaagtgcataaagcacgtaattttcaagaacaaatagatgttgcagctagaatgttagactggttagatggctcagagttaaccactacacaaggtgacatacgtgtacaagatgcatacacattacgctgtattccacaaatacatggcgcaagttttcaagtatttaattatgtgaaagaaaaattagaatttgaaatgaacgctgctaatgataatccattaatatttgatgaaggcgatgaaacgcttgttatttctggaggtaatttccatgggcaaccgattgcctttgcattagatttcttaaagttaggtgtaagtgaattggctaatgtatcagagcgtcgtttagaacgactcgtaaatcctcaattaaataatggattgcctgcctttttaagtccacaaccaggattacagagtggcgcgatgattatgcagtatgctgctgcgagcttagtatcagaaaataaaacactcgcacatccagcaagtgttgactcaataccatcgtcagctaatcaagaggatcacgtttcgatgggaacgattgcctctcgtcatggctatcacatcattgaaaatgcgagacgtgtcttagcaattgaaacgattattgcattacaagccgttgaatataaagatattgataaattatcaccgaaaacatatgaaaagtatcaagaattacgtcacatcgtaccatcaattacagaagatagacagttccataaagatattgaagcggtatcgcaatatttacaagatcttgcttatatgtagggactctaattgacataaacgttgtcacccttgaaatagctgatgttatttgctatatttaaattaacttaattatgctattgttcgtaggataagtaatattgaatcttgatttcagagagcttgtggttagtgtgaacaagtaatcatatttaattatgaatctacctactatatgagaacaatcggttatagccgttatttagcgagagtgcagtctaattttggactgttaaatagggtggcaacgcgtagaccacgtcccttgtacagggacgtggtctttttgtgttattatccaataaattttgaaatttgaaaggatgaccagcatgttagatattaaattattccgtaatgatccagaattccttaaagaaaaagttgcaaaacgtggtatggattcaaaagtagtagatgaagtattagaactagatgagcaacgtcgtcaacttatcagtcaagccgaagaaatgaaggcagagcgtaataaagtgagtggagaaattgctcagaaaaaacgtaataaagaagatgcagacgatgcaatcgcagctatgcgtaatctaggtgatgaaattaaagtactagatgatactttaaatcaagtagatgttgaccttagtgataaattgtctcgtattccaaatatcattcacgacgatgtaccagaaggtgctacggatgaagataatatagaagttaaacgttggggtacacctagaacttttgaatttgaagataaagcacactgggatttagtagaagagttagagatggttgattttgaaagagcagctaaagtctctggtgcgagattcgtattcttgacaggtgacggtgcacaattagagagagcgttaatgaactacatgattacgaaacatacgacacaacatggctatacggaaatgatggtaccacaattagttaatgccgattctatgtatggtacaggtcaacttccaaaatttgaagaagacttatttaaagtagaaaaagaaggtctttataccattccaactgcagaagtgccattaacgaattattaccgcaatgaaatcattgcacctgacgtattaccagctaaatttacagctcaatcagcttgttatcgtagtgaggctggatctgctggtcgtgatacacgaggacttattcgcttacaccaatttgataaagttgaaatggtacgtattgaaaaacctgaagattcttggcaagcacttgaagacatgactcatcatgcagaagcgattttagaagaacttggtttaccatatcgccgtgttatcttgtgtacaggagatattggttttggttcaagtaaaacatatgatttagaagtttggttaccaagctataatgattataaagaaatcagctcttgttcaaatattacagatttccaagcacgtcgttcaaacattcgcttcaaacgcgataaaaatgcgaaaccagaattagcgcatactttaaatggtagcggattagctgtaggtcgtacctttgcagctatcgttgagaactatcaaaatgaagatggctcagttacaattccagaagtgttagttccatttatgggtggtaaaacagtcatccgtccgactaaataaaaaactgaaagtaatgctaaaaacgcgtagcgacaataggtcctatgcgtttttttgtgcactatcgaaagggtaggggaggtgtaaaaagtataaaatagcaaatatgattaggcggaattcagatatattttagaggtatgtcttaattatttctaaaaattcagataaatataaacaacgtgtgtttaagctttttaagacaatcgttagtctaacctcacacaaacggatgtctaaagatattgcgcatttagaatcagttgtattagaattgatatattatttttgaagtgccatgagagggtgggtgtgtatggaaaatgaagcgcatgtaacatttaaacaaggtgtcaaagcgtgtattcctaccttgttaggatacgcaggtgtgggtttatcatttggaattgttgcagttgcttcaggatttagcttgttggaaattattttactgtgtttgcttgtatacgcaggcgtagcacaatttataatttgcgcgcttgttattgcaggtacacctatatccgcaattgtattaactgcgttcatcgtcaattctaggatgttcttattaagtatgacacttgcaccaagctataaagattatagtttactaaatagaattgggttggcaacattggtaacagatgaaacatttggggttgcagtgacaccacatctaaaaggcgaaaaaattaatgatcgatggctacacggtttgaatataacggcttatgttttttgaacgattgcatgtattattggtgctttatttggtaaatacatccatgacccagacgtattaggcttagactttgcaataacggctatgtttatttttcttgccgtctcccaatttgaatcaatcaggcgctcaaaagttaagatttacttagttctgattatttgtgtcattgtgatgatgttgggattaagtttatttatgccatcatatttagcgattattttagcttctacaataacggcagcacttggggtggtgatggaacgatgacgacaacgatacatatgttaacgattattattttatgcggaattgtgacatggttgactcgaattataccgtttgtgatgatttctaaagttcatttatctgaacgtgtagtcaaatggctctcttttatcccaattacattgtttacagcgttgattattgatggtgtcttggttcaacaagagggcgtaatgggatacacaatcaatatgccatttttgataacgatgatacctacgattgtagttgccatcgtttcaagaagtttaacgataacgattttaagtgggattattattatggcattgttgagatgggttttttaaagaatatcattgatgaaacacaggatatccgttagaattagaataattagaaaattatgatatttccgatttttagtctgtcatacttttgttttatacaattaaaatcaaatcttatttcgagaagctgagggacttggcccagtgatgcttcagcaaccggctgtgtagtacggtgctaaaaccaacgatacactcgaatgataagtaatcataacttcttacttatgttatatgagtgagaagttttttattaagtaggagggaaatcatgacgaattatacggtagatactttagaattagggccttttacaacggaatctggagaactcatatctaatttgaaactacgctatgaacatgtggggttgaaaggacaacctttagttgttgtctgtcacgctttgacaggtaaccatttaacatatgggacaaatgatcaaccaggatggtggagaggtatcattgatgggggctatatgcccatcaatgattatcaatttttaacttttaatgtaattggtagtccgtatggttcaagttcggcattaacagatgctgatttccctcaaacgctcacgttaagagacattgtacgtgcaattgaaataggcatagaaacgttaggatttgaacacattaatattctcattggtggttctttaggaggcatgcaagcgattgaattattatataatcgcaaatttaatgtcgataaagccgttatacttgctgcaacggataaaacatcatcctacagtcgagcgtttaacgagatagcgaggcaagccattcatttagatcctaaaaatggtatgagtatcgctagacaattgggtttcttaacttatcgatcatctaaaagttacgataagcgcttttcaccagatcaagttgtcgcctatcaaaaacatcaaggtgataagtttatgaatcattttgattacgcatgttatttaacactgctggatgtcttggatagtcatgatgtcgatagaggacgtgatgatgtggatgaagtattccgtaatttagatacgaaggttatgacgatgggctttaccgatgacttactttatcctgatgaccttgttcgagcagtcggcgagcgctttaaatttcataaacattttttcgttcctgacaatgtaggacatgatggatttttacttaacttcaatgattgggcgccgaatctatatcactttttaaaagtctataaaatcaaacgtaaatgaactaactaaatagatttaatttttgggatgtgccggttgtcttcttactactaaatagaggtgagaaacaagttggttacatcctatttttgtgtgaaatataaataagttgttgttagtgaagaagcgattgatatataacaatgatttctaaggattatagtgaaggtgtattttctgaatagaacttctatataaaatgggttgccaataattgtataaaagttttaaagaggttaaaataaagggtatagtcaaaaatagtatgggagtggcgaatttgttttctaaaatatatcctaaagcaactgtgcttagtattctaacgctaatcgtagtctctttggctttgcatatattaccaccgcttggtcttgtattgagcgcgtttgcgacaattcctggcattatcttatggcataaatcaattgaatcattcggattgacagctgtcgtaacggttgtattaacaactttactgggtaatatatttgtattaagtatcatggtcctcgtgctcattacgagtttcgttgttggccaattattaaaagaaagaacatctaaagaacgtatactatatataacgactacatatattagtatgatttcattaattgcatttatgggactgcaaacgtttgataagataccaagcgcgacagttttaatgaacccaataaaagatcaaatgcatcaggttatttcaggtgcttcagttggtaacgagtataaacaaatgctcgaagagggattccgtcaattggcagttcagttaccaagtatggtaatcattgcagtttttctacttattttaatcaatttaattattacttttccaattttacgtaaattcaaaatcgctacaccaatatttaaaccattatatgcttggcagatgagccgttcattattatggatatatattattgtcttgatttgtgttatgtttgcaagccaagctggtactttccaaagtatcgttttaaattttgaaattgtgttatcattatgtatgtatattcaggggttaagtgttattcactttttcggcaaagcaaaatcaatgccactcgtacttactgtgttactaatggttatagggacaattttaatgccattaacacatattgtaagtctcctgggtgtaatcgatttatgttttaacttaaaaagtatcattaaaaaatgatttgaggtggaagaatgaaccgtcaatccactaaaaaagcgttgattttaccatttgtaattatgacgctcacggcaattgcgctggttgtagtttggtttgtttttaaccaactcgtagcaggtatagcgacgattgtattagtgattattattatagggacagcatttatggtaagacaagctttacaaaaattagacagctatgtggacaatttaagtggtcatatctctgaaggtagtaatatcgcaattaaaaatctacctatcggaatgattatcttagatgaaaatgaaaacatagagtggatgaatagatttatgtcggaacgtttaaatcgtaatgtaatttccgacccagtcaacgaagtatatcctaatatcttaaaacaattagaaaaaacacaagaaatagaaattaatgaaaatgaataccactatcgtgtgcgttattcagaaaaagaacacgtgctttatttcttcgacattacaaaagaagtctatacaaatgaattatatgaatcatctaaaccaattatagcgacattattcttggataattatgatgaaattacccaaaatatgaatgatacgcaaaaatcagaaattaactcaatggttacgcgcgtcatcagtagatgggcaacggaacatgatatttactttaaacgctatagttcggatcaattcgtggcatatttaaaccaaaatattttaaacgaaattgaagcaactaactttagtattttaagccaattacgtgaaaagagcgtaggttatcgcgcgcaattaacattaagtattggtgtgggtgaaggttctgaaaatctaattgatcttggagaactttctcaatctggcctagatttagcactcggtcgtggtggcgaccaagttgcgattaaacacatgaacggtaatgtacgtttctatggtggtaagactgacccaatggaaaaacgtacacgtgtaagagcgcgtgttatctcacatgcgcttaaagatatcttaatggaaggcgacaaagtgattatcatggggcacaaacgtcccgatttagacgcaattggtgcagcaatcggtgtatcccgttttgcgatgatgaataacctagatgcctatatcgttttaaatgaatctgatatcgatccgacgttacgacgtgttatggatgcggtaaatgaaaaaccagaacttaaagatcgtttcatcacttcagatgaagcatgggatattatgacttccaagacaacgcttgtcgttgtagatacgcacaaaccagaaatggtcatcgatgaaaatattttaaataaagccaatcgtaaagtagtcattgaccatcatagacgtggtgaaagtttcatttcgagtccattacttgtatatatggaaccttatgcaagttcaacagcagaactcgttacagaattactcgagtatcaaccaacagaacagcgtctgacacgtttagaatcaacggtcatgtttgccggcatcattgtagatacacgtaactttacattacgtaccggctctagaacatttgatgcggcaagttatttacgtgcacatggtgccgatacaatcttgacgcaacatttcttaaaagatgaccttgatacgtatattaatcgtactgaattgattcaaacagtgaaactacaagataatggtgttgccattgcacatggttcagatgagaaaatctaccatcctgttacagttgcacaagctgccgatgaactgttaagtttagatggtgtagaagcttcttatgtaattgcaagaagagaagacaatgtcgtaggtatgtctgcgcgttcacttggtgcagtcaatgttcagttaacaatggaagcacttggtggtggaggtcatttaacgaatgcagccacacaattaaaagatgtgactgttgatgaagcaattgaaaaattacaacaagctataacagaacaaatgagtaggagtgaaaattcatgaaagtaatattcacacaagatgttaaaggtaaaggtaaaaaaggcgaagttaaagacgtaccagttggttacgcaaataacttcttattgaagaaaaacatggcagttgaagcaacgccaggtaacttaaaacaattagaacaaaaaaataaagctgctgaagcagaacgtcaacaagaaattgaagatgctaaaaaattaaaagaacaattaagtgagattgaagtcgaagtatctgctaaaacaggtgaaggcggtaaattatttggttcagtaagtaccaaacaaatcacacaagcattacaacaacaacatgacattaagattgataaacgtaaaatggacttaccaaatggtatccatgcattaggttacactaacgtaccagttaaattagacaaagaagttgaaggtacaattcgtgtacacacagttgaacaataataacggattgagatatgaggtgtaagcgcaatggatggaatggatggaatgtacgaacaaaatcaaatgccgcacagtaatgaggctgaacagtctgtcttaggtgccattatcatagatccagaattaatcaacactactcaggaagtattacttcctgagtccttttatagaggggcacaccagcacattttcagagcaatgatgaacctcagtgaagataataaagatatcgatgtcgttaccattatggatcagttatcccaagaaggacgattgaatgaagcgggcggtcctcaatatcttgcagaattatcaagtaatgtgccgaccacacgtaatattcaatattatacggaaattgtgtttaaacacgccacgaagcgtaaattaattcaaactgcggatagtattgcgaacgatggctataatgatgaactggaactagatacgatacttaacgatgctgaacgtcgtatattagaactatcatccacacgtgaaagtgatggatttaaagacattcgagatgtcttaggtgatgtttatgaaaatgcagaactattagatcaaaacagtggtcaaacgccaggtattccaacagggtatcgcgatttagaccaaatgacagcgggttttaaccgtaacgatttaattatcttagcagcacgtccttcggtaggtaagactgccttcgcacttaatattgcacaaaaagtggcaacacatgaagatcatttttctgtagggattttttctttagagatgggtgcagaccagttagcaacacgtatgatttgtagctcgggcaatgtggattcgaaccgcttaagaacaggtatgatgactgaggaagactggaatcgtttcacaattgctgtaggtaaattatcacgtacaaagatatttattgatgatacacctgggattcgtatcacagatattcgttcaaagtgtcgtcgcttgaaacaagaacatggcttagacatgattgttattgactacttacagttaatttcaggtagtggttctcgtttttctgacaatcgacaacaagaagtatcagaaatatcacgtactttaaaggcgattgccagagaattagaatgtcctgtgattgcattgagtcagttatctcgtggtgtagaacaacgtcaggataaacgtccgatgatgagtgatatacgtgagtcgggttctatcgagcaagatgccgatatcgtagccttcttatatcgtgatgattattacaatcgtggcgaagatgaagacgaagatgatgattcaaattacgaaccacaaacgaatgacgataatggtgaaattgaaatcattattgcgaaacaacgtaacggccctacaggcaccgttaagttacactttatgaaacaatataataaatttacagatatagattatgcacatgctgattttggataaggtaaaaaaataattttcttgttaatttccgtacaataatacaaatacgtatttcattgtacggtttttgtttgtgtttattgccgtgtattcgcggtaagtatgtgtccttataaatgtaaaaaatggtcttaatacttggtgcgactggatttaaactgtatctctttccactttgaacaccatcaaaattttcaaaatataaataaattaatgttcgatttttggtttgcaatatggttggtgtattggtaaaatacgtaatggttaatcgagaaaacttggaggtgctcatatgtcatcaatagtagtcgttgggacacaatggggagacgaaggtaaaggtaaaattacagatttcttagcagaacaagcagatgttattgcacgtttttcaggcggtaacaatgcaggccacacaattaaatttggtggagaaacatataaattacacttagtgccatctggtattttctataaagaaaaattagcagttattggtaatggtgtcgttgtcgatccagtagcactattaaaagaattagacgcgctaaacgaaagaggtatttcaacggataatttacgcatttcaaaccgtgcgcaagttattttaccttatcatattaaacaagatgaatatgaagaagaacgtcgcggagataataaaatcggtacaacgaaaaaaggtatcggtccagcttatgtagataaagcacaacgtattggtatccgtgtcgcagatttattagataaagaaacatttgaaaaattattaaaagataatattgaatacaaaggtgcatacttcgaagggatgtttggcaaagcatgtccaacatttgaagaaatctttgaaacatattatgcagctggtcaacgtttagcaccattcgtgacagatactgcaaaagttttagatgatgcctttgtagctgacgaaaaagtattattcgaaggcgcacaaggtgtgatgttagatatcgaccatggtacatatccattcgttacatcaagtaacccagttgcaggtaatgtgactgtcggtggcggtgtgggtccaacattcgtctctaaagttatcggtgtgtgtaaagcctatacatcacgtgtcggcgatggtccattcccaacagaactatttgacgaagatgggcaccatatccgtgaagtaggtcgtgaatacggtacaacaacaggacgtccacgtcgtgtaggttggttcgactcagttgtattacgtcattctcgtcgtgcaagtggtattacagatttatctattaactcaattgatgtattaacaggccttaaagaagttaaaatctgtactgcttatgagttagacggtaaagaaattacggaatacccagctaacttgaaagacttacaacgttgtaagccaatttttgaaacattaccaggttggacagaagatgtgacaggttgccgttcattagaagaattacctaataatgcgcgtagatacttagaacgtatttctgaattatgtgacgtgaagatttcaatcttctcagtaggtccagaccgtaatcaaacaaacctattaaaatcactatggtaagatcgtagattagatattataaaaaccttgtagatgtcatcacacaatgagtggatggtacttctacaaggttttttgtttatctatattaatgatttatgtgatgatcgcgaaaagtgaggatttgatcaactgccgttacgtaaccaggttgatccaaggcttgtgtttgcttgatttttttaatctgtgcttgataagttgcgcgattctgtaacatttccacaacttttgctttcaaatcttcggttgtgacagtttcagaattcagttgttgacctacgttgatattttcaatttgttgcgcaacgagcggttggtccgcattttgtggaaaagccaataaaggcacatccattaataatgcttcatttgtactattcattccagcatgtgttaagaaaagtgctgtatgctgtaatagttctgtctgaggtacataggatttcaataatacattatcagggactgtatcaaagtcagccgcgttatttgcttcaccaatcgatacgatgacagatacatcaagatcttttaacgcggcaaaacattgattaaagaaaccaatattttgattaaataccgtgccaagggaaacgtaaactattggtcggctttgatcaacttgactcataaaatccgttgactgtggttgcatcacagatggtccaacaaaacgataatgtgctgaatcaaataattcaggatttatttggaatttttccaagatataagcaatattgaaatcccccggattattcattgtttcataacgtgagttaacctcgacgccataggttgtttgaatatgctgttgtaaatgattaaaagtgtcttctacgtcattcatttctgtttctgataacgcctgtgcattatagttgagtgccgcttcaaacgtttctgcagtatgtgcaaaagaggtaatcgacgaaatggtaggaatatgtaatttttgcgcaattaagttaccaaaactaaacatggagtcagaaattaaataatcataatgttcatttttcgtatcttccaaaatctttggaagtattacatccgcagtattcaataagccgttgacgacgtggaataaattgccagagccgtatgctgtaaagcgttgtataatctcatctgttggtagtgtacgtatttccacacccgtatcttttagcttgtcttgatattgatctccaatgtagtaaaccacctcttcaccacgcgccacaagttctttacacacggcaatcgtaggattaagatgtccaatggatcctgaattaataaataataccttagccaatcataagccctcctcatattttatttaactagtttatcaaaaagtgttgaaaacaaaaaagatttaaattttaatagtttttaaaaaaatatcaatttctcatattttagtgactgaaatgataaaaatgaatgtgctgccataccaatatgacagactttttaagcgttttagcaccgtatttgaactttatacaattaatatagaaaattatactaataaaattaaaaaaatagcttgtcatccagtataagagttgatataatttattttgtgcttaagacaggctccttggtcaagcggttaagacaccgccctttcacggcggtaacacgggttcgagtcccgtaggagtcaccatttttaggtctcgtagtgtagcggttaacacgcctgcctgtcacgcaggagatcgcgggttcgattcccgtcgagaccgtataaacccatccaataggatgggtttttttatgcgtaaatatagaaatgtataagttttgctagataattttttatatcatgttgtaatatggtggatgagcaatactttatcgtatgttttggttggaacctatttaatgaatgaataaacttttttacaatgaagtgaaatttaaaatgaggagtaaataaatgacaaatcataagcatatagaagaaacagatttgattaacctcatcagtgatcgacaccatgacttaagacaaaaagtagaatatatgacggcacaacaattacctcaggttcattttagtagttctgaatggtatttaattatgatcattaaatatgatcagcctacttttgcagaactcacgcataagatcaatttaacgcgtcaggcaatccataaagcagtgaaacaattagaacagaaacaagttgttcaaattgaaagtgtgcccaataataagaaagaaaaacgtgtaaccttaacggaatttggtatcatgtgttatgagaaatatattaaaaacaaacaacacatcattgaacatattggtcaagtgatcggtgcgtcagaagttgcacatttagagcaattgttacaagcagactggcaattagaaaatgataagccagatgaataattagagtatataaaacgataaacacaacgttacatactctaatttttttgcaattcattattgtaaactaggttgacaataatggcgaaattttgctaaagtaagttggtcagtcttttcgactacataaatagctagagcatttatatagaagattgtcgcataatgatgaaacaatgttacttaaagatggcttgaattcaggggtatgtggcataaagtttctttacaaagggatcttgagtaacatcaaacatcttctatataacatgcatcattcttagcataataaaaattcaatggaaatataggaataagtcataacttatgtagatgaattaagtagaagaaagcaatcgatgattatggaaacagtagttgatttgtctcatccatacttaacactctcatttatacttatacttcatttaccatcaaaaaggagtatatcaaatggcaacacaagtaaacgtaaaaagcccgaaaatgtttgcactggtcttaatgattggtggatttatgggactgttcagtgaaacagcactcaatatggcattaaccgatattatggctgactttaaagtatcagcggcaacggtgcaatggttaacgacagggtacttactcgtcatggcttgtttagtaccagcgtcatcgtaccttattaaatggtttagcacaaaaacactaattgtttcaggtattttattatcattattaggcgtagttattggcgcgcttgcacctaacttcggtttactattattgggacgcttgattcaagcgttagggacaggtattttattacctattatggttacggttttgatgcttatcttcccaattgaaaaacgtggtgcggttatgggcatcatgggactggttattacagcaggaccagcactcggccccacactttcaggtgtcattatttccgcatctagttggcactacatcttctggattagtgcagtgttatatttagtcgtcttaggtttagcttttacaaatactgagaatgtaggagagatttcgaagcctaaaatcgatatcctatccatttgtttatcaacgattggatttgctggattaatcttcgcattaagttcaatggcagaagcggccttcacaaatgttatcgtttggctaccattagtcatcggtatcctagccttaatcatctttgttgtacgtcaatttaaaattgactcaccaatgcttaacttaaatgtctttaaatatcctatgttcgtccttggggcagctatggtatttattacgatcttatgtattttatcaacaggcatcttattacccttatatttaaaaggcgccttactatttagttcagtgattgctggtttaacgttattacctggtaacgcagtcaatttagtattgtctccggtcgtcggttcattgtttgaccgctttggtgcgagatacttcggcattatcgggtatttattaatgtttatcgctgcaatgacgtttgcactcattatttctgcatctacaccagtttgggccattattcttacgtttatggtacttttctttggtatcacaatggtaatgatgccagcataaacgaacgctttaaatcaactaccacacgatttatacgcagatggttcagctaccattacgacattaatacaagtcggtggttcagcaggtacagctatcgccattacgctttatacaacagcaatgaaatcatttggcgctgctaatccgaatgtaagccaagaaatcatactttcacatggcgtacagtttacctttttctttatcactgcattaacagtgattggttttatactttcattattcgttaagaaacagaaaagtgtctaagcatccgttacagtgattagtaagctatgacaatgaggcttttcaacattgaaacaagcgttgcgtcgacacgcacgtgataaataacggaatgatacagttttagataaatataaagcactacagagggaggagcatacgtcatctaatgcatattaggtgacgcgtgcgctcccttatttgtgttataagcaataaattagaatgatacaggatgcttgtttaaactaggcatacctatgatgacccgatgaatacccatttaatcgggataatgttataattttacaatatacaattttaaatttttatttggaaaaatagaattagagcgccataaatggtaaattgtattatagggaaatgcgtagaatttaatgtaaatgtactacaatatagaaatgaggtttataaatatggctagaaaagttgttgtagtcgatgatgaaaaaccaattgctgatattttagaatttaatttgaaaaaagaaggctacgaagtattttgtgcctatgatggtaacgatgcagtcgatttaatctatgatgaagaaccagacatcgtgttattagacattatgttacctggtcgcgacggcatggaagtttgtcgtgaagtacgtaaaaaatacgaaatgccaattatcatgttaacagcgaaagactcagaaattgataaagtattaggtcttgagctaggtgcagatgactatgtgacgaaaccatttagcacacgtgaattaatcgcgcgtgttaaagccaacttacgtcgtcattattcacaaccagcacaagaagttaatgatgcgtccaatgaaattacgattaaagatatcgtcatctatccagatgcatactctattaaaaaacgtggcgatgatatcgaattaacacaccgtgaatttgaattattccattacttatctaaacatatgggacaagtaatgacacgtgaacatttattacaaactgtttggggttatgactattttggtgatgtacgtacagtagacgtaacaattcgtcgtttacgtgaaaaaatcgaggatgatccatctcatccagaatatattgttacacgtcgtggtgttggatatttcctccaacaacatgaatagaggcacatattaatgaaatggcttaaacattttcagtccttacacacgaaattggttattgtctatgtattactcattataatcggtatgcaaattatcggtttatattttacgaatagtctagaaaaagaattaacacaaacatttaaaaataatatttcgcaatacgcgaaacaaattgaaattaatatagaaaaagtctatgacgaagataatgcaattaatgctcaaaaagaagttcagaacttacttaatgagtatgcgaatagacaagaaatagaagaaatccgctttatagataaagatcagattatcatggctacttcaaagcagtctacgcgtagtctaattaatcaaaaagcgaatgacaactccattcaaaaggcactgtcactcggtgaaatcaatagccataccgtattaaaagactacggtaatggtaaacaacgtgtgtgggtatacaacctgcctgtgaaaacatcaaacgatggcacaattggtgatgtctatatcgaagcggacatcaatgatgtgtataaccaattgagcaatatcaatcaaatctttatcgttggtacagggatatcactattgattaccgtgatactcggtttctttattgcccgtaccattacaaagccgattacagacatgcggaaccaaaccgttgaaatgtctaaaggtaactatacacaacgtgtgaaaatctacggtaacgatgaaatcggtgagctagcactcgcctttaacaatctgtccaaacgtgttcaagaagcacaagcgaataccgaaagtgagaaacgccgtctcgattctgttatcacacatatgagtgacggtatcattgcaaccgaccgtcgtggccgtgtgcgcattgtcaatgacatggcactcactatgatgggcacaatgaaagaagacattatcggtgaccacatgcttaaagtgcttaaactcgaagaagatttctcattagatgaaattcaagaaaataatgatagcttcttattagatattaatgaaaatgaaggtattattgcccgggttaactttagtacgattgtacaagaaactggttttgtgacaggttatattgccgtgctacatgatgtaacagaacaacaacaagtagaacgcgaacgccgtgaattcgttgcgaacgtctcacacgaattgcgtacgccactgacttccatgaacagttatatcgaggcactcgaaagtggtgcttggaaagatggcgaattagcaccacaatttctatccgttacacgtgaagaaacagaacgtatgattcgtcttgttaatgacctattacaattatctaaaatggacaatgaatcagagcaaattaccaaagaaattgtcgactttaatatgtttattaataaaatcattaaccgccatgaaatgtcagcaaaagatacgacatttgtgcgtgaaataccaaccgaaaccatctttacggaaatcgatccagataagatgacccaagtgtttgacaacgtcataacgaacgcgatgaaatactctcgtggcgataaacgtgtcgagtttcacgtgaaacagaatgcgttatataatcgtatgaccattcgtgtgaaagataatgggattggtattccaattaataaagtagataaaatatttgaccgcttctatcgtgtagataaagcacgtacacgtaaaatgggtggtacaggtttaggcttagccatctctaaagaaatcgttgaagcacacaacggtcgtatatgggcaaacagcgtagaaggacaaggcacgtcaatctttattacacttccttgtgaagttctagaagatggtgattgggatgcggagtaaagaattaattaaatcgattatcctcatccttcttgtcttaatgagcgtcgtgttaacctatatgacttggaatttctcacctgatttagccaatgtagataaccaaggtagcaacagcaaagattatgagcccaatacaattggcaaaccgttgaatcaaggtatggatcaagtcattacaccctatcaagtggttcactctaaaggtgaccagactgaaggcatggaagcgacaaagcaaaatatcgaaaccatattaaagccattaaagaaccatcgcgtattgcatgcggaacaaatgcacagcaaccacaacttaatcattccagatttaacggatgagtttctcgtacttgatttcagctatgacacgccattagcaacctacttaggacaagcgctgaatatcgatgccaaagttccgaataattttaaattcgatcgacttatcatcgacaataacaaagatggcaatgtgaaactttatgcgattagtagcgatagacataacgttgtgcgtatgaccacttccgcaaaattaaataacttaaaaaaagtgatgcaaacacaacataaaaaaatgcagccatactcagaaatcataacgaataaagatacgattgatagagcgacacatatctttgcaccaaaatcaccagaagcgatgaaatcatatcatacgatttacaaccgcatcagtgttgatacgatgaactctatattattcaatgattctgtcgttgtacgtagtacgaagagcggtaccgcaacctataacaataatacaggtgtggcgaattataatgatgaaactgaaaagtatcgttatactaacctttcagaagatgaaaaccgttcaactaacatgcaagatagtataccaagtacctatgactatattaataaccacggtggttttactgatgattatcgtttattcaatatagataataaaaatggggaacttacctatcaaatgttcttaaatggtcgtccaacatttaacgatgaaaatttaaacaatatcaaagtatcttggggagataaaggcgtcttcagctatgcacgtgcattgcttaaagccaatgtcacaattgacagtggcggaaatgaaacgaaattgcctggtgctgaaacggtacgttcagagttggccaacaacccagaaattaactttgaagatgtgacgaacatgacgattggttacagaatggaagaaaaaccagataaaagtgatattgaaattcaacgcaatagcgaatttaaaccacaatggtatgtacaatataacggtgaatggcgtgcatacgaagatgggaggctagaataaatgaactggaaacgagccaaaactttatttattttcgtgtttattctagtcaatattagcttagtgattatttatattgataaggtgaataaatcgcatatcaatgatagcgaagaagaaaatgctgtgaattttaaacaagaagaaattacaattcctgataaccttccaagtgttaaaggtttgaaaatgcaattattgactgcacggtcatttgatttttcatcttatgcaaaatcacgctctgagatctcaagtgaagattccggtgccagagcaaaaggcgatatcaataatgcagtcgatgtcggaaatgatcaatataccgcattaaaatcttacgtcaaagacaatgtctataaaggtaaggattacgaaatgagtaatattgataacgacaaggtgacctttgaacaaacgtatcatgactatccgattatgaacaataataaagcgagacttgagtttaatgttaataatgatggtaaagcaatgagctataagcaaaccgcaatgaaatcgattgcgccatctgaaggtgcgaataacgataagaaacaagtgaattcagctaagagcgccatagaagcactgtattataatcgttacttgaagcggaatgatgaagtaaccaatgcacgatttggctactataccgttgttaaagagccgaacgtacaagtactcgaagctaattgggaaattaaagtcaaacacggtgataagattaagacctactatgtcgaagccgtatcagacagccccaaaattattgaagaataatgtggattatataggcacaccttttgaaggtgtgcttttttggattgtttgagttttgtttgagaatttttgaaaaagatgcttgttaaaataaacaatatacacagaagtgaagtcaaaagtatgttaaaattaaatactgttaataacgtgttatggaaattttaaataacgcgaaaagatattataaaaaagtcgaaatcatgttgatttatcattgagtagataatcataagacggttaatattttagaaaagtgcagtatgcttgtaacttttataacgatataaggaaaagttatgatagcgttgctagattgcactttatcaatagaataaattagacagagggcatgttgacggcacataaaccgtagtctgcccagtaataataacgttaaacaatgtttatagattagaaagggtgaatcgcttgatacgtatgagtgtattagcgagtggtagtacaggaaacgccacttatgtggaaagtgataaaggcagtatccttgtcgacgcaggtttgacaggaaagaaaatggaagaactatttggacaaatagacaaacagattcaaaatttgaatggcatcttggtgacacatgaacactcggaccatattaaaggtcttggcgtgttagcacgtaaatataagttgccaatttacgctaatgaaaaaacatggacagcaatagaaaagaaagacagcaaaattccaatggatcaaaaatttatcttcaatccatacgaaacaaaatcaatagccggctttgatatcgaatcgtttaacgtgtcacacgatgccatcgatccacaattctatatcttccataataactataagaaatttacgattttaacagacacaggttatgtctcagatcgtatgaaaggcatgattcaaggcagcgatgcatttgtctttgaaagtaatcatgatgtagatatgttacgcatgtgcggttacccttggaagaccaaacaacgtatcctcagcgatatgggccatgtttccaacgaagatgcaggtcgtgccatgacagacgtcatcacgggtagtaccaaacgcatttacctgtctcacttatcacaagacaacaatatgaaagatctcgcacgcatgagcgtcggccaagtacttaacgagaacgatatcgacacagaaaaagaagtattgctgtgcgataccgacaaagccaacgccacaccaatatatacgttatagaagcccttgcccctttattgaggggttagggcttcttaatgcattagcgtaagcgaatgtaatcattaatataaacagacttaacaggaaaagtttagcgactacttaaggaactcacataatagacatcatttaaggtacatatttaacctatatctcataaggaggtataggttttttgttagccgtcatcataaatcgtacatggttatacaaccctatgtcttaacacagatgaaatatacagtaatcgaataaatataactaggggataacatggtattttgtaaggattagacaagagctttatgaagaaaaggttaagtttgtgaataagtatgtaagacaaccgtcaacttatccactgttttgtccaaagttatccagagatgtgaacaattcacatagaaatacccacattatacacagggttatccacaaatacacaggttattctttcttttttgttgataaaacgtaaaaattattaaaaagcaatatacattactgttataataagagggaatagtgtgaataagtgtataacttgtggataagtctaacaacttatacttttcactaaactcggaggataaaaatgaagataacaatactcacagtaggtaaattaaaagagaaatactggaaacaagccattgcagaatatgaaaaacgtttaggtgcctattcgaaagtagaaatcatcgaagttcccgatgaaaaagcaccagaaaatatgagcgataaagaagtagaacaagttaaggaaaaagaaggccagcgtttgctagcaaaagtaaaacagcagtccacagtcatcacgttagaaattaaaggtaatatgttaacgtctgaaggtttggcaaaagaaatagaaagccgcatgacacgtggccaaagtgcttttacattcattattggcgggtccaacggtctgcataaagacgtactagaccgcagcgactacgcactatcattcagcaagatgaccttcccacatcaaatgatgcgcgtgatattaatagaacaagtttatcgtgcgtttaaaatcatgcgcggcgaagcgtatcataaatgatgcggttttttcaaccgctccataaaggtattttgaacgtatcggaacgtatgaggtttatgagaattgcagttatgtttttgtgaagcgtatcataaataaaactaaaaaataggttgtatataactcactttgaaattgattgaatatatagtaactttaatagaatgcagctattgtggcgtagaatatgagaatcaaaaaatgattaatatagtttgaagagagtgagcataaatactagaaaaatggccagtaaatgagtttactataaactcatttactggcttctctaataattatcaagacaattttcgtttctaggcatactctgaaatgcgttattttctttaagaatattaatatatgacttgttttggtaatgataaccttggtcagagtgtattgtcatgcgatagttaagattagatcttttaattaaaacattgttttaaatatcgatgacaaggtctaatgtaggacgtgtagacataagtttcggaattatataaatccataaaagtagataaatcgaaaatatttatacccctaaggggtatgtgttatagtataagtatagctaatataatattttcataaataggaggagttaatttgaagaataatggtgaagagcttaagcatcaaaatcacatgaatcattccaatcaaatgcatcatgataaccatgaatcacataatcatcatagtggccatgcacatcatcatgggaattttaaagctaagttttttgtttcattaatttttgcaatacctatcatttttttatcgccaatgatgggtgttaacttaccttttcaattcacatttccaggttctgaatgggtagtgttaatattaagtacaattttattcttttatggtggtaaaccgttcttgtctggtggtaaagatgaaattgctacaaaaaaaccaggcatgatgaccttagttgccctaggtatttcagtagcttatatttatagcttgtatgctttttatatgaataactttagtagtgcaactggtcatacaatggactttttttgggaattagcaaccttaattttaattatgctattaggacattggatagaaatgaatgctgtcggaaatgctggagatgctttaaagaaaatggcagaactgttacctaatagtgctattaaagttatggataatggccaacgcgaagaagttaaaatatcagacatcatgactgatgatatcgtcgaagtaaaagccggagaaagcattccaacagatggtattatcgttcaaggacaaacatctatagatgaatccctagtcactggagaatctaaaaaagtacaaaaaaatcaaaatgacaacgtcatcgggggttctattaatgggtctggaacaatacaagtcaaggttacagctgtgggagaagatggatatctttctcaagttatgggacttgttaatcaagcacaaaatgataaatctagtgctgaattgttatctgataaagtggcgggttatttattctactttgctgtaagtgtcggcgtgatttcgtttatcgtctggatgctcattcaaaatgatgttgattttgcattagaacgtcttgtaactgtgttagtcattgcttgtccacatgctttaggcttggcaatacctttagtcactgcacgttctacttcaattggtgcacataatggtttaattattaaaaatagagagtctgtagaaatagctcaacatatcgattatgtaatgatggacaaaactggtactttaactgagggtaacttttctgtgaatcattatgagagctttaaaaatgatttgagtaatgatacaatattaagccttttcgcctcattagaaagtcaatctaatcacccattagctataagtattgttgattttgcgaaaagtaaaaatgtttcatttactaacccacaagacgttaataatattccaggtgtcggattagaaggtctaattgataataaaacatataaaataacaaatgtctcttatcttgataaacataaacttaattatgacgatgacttgtttactaaattagctcaacaaggtaattcaatcagttatttaattgaggatcaacaagtcattggcatgattgctcaaggagatcaaattaaagaaagctcaaaacaaatggtagctgatttactatcaagaaatattacaccagtcatgcttacaggtgacaataatgaagtggcacacgctgtcgcaaaagaattaggtattagtgatgtccacgcacaactcatgccagaagataaggaaagcattataaaagattatcaaagtgacggtaataaagtcatgatggtcggagacggtatcaacgatgcgccgagtcttataagagccgatattggtatagcaattggtgcaggcacagatgttgcagtggattcaggtgatatcatacttgttaaaagtaatccatcagatattattcatttcttgaccctttcaaataatactatgagaaaaatggtgcaaaacttatggtggggtgcaggttataatattgttgctgtacctttagcagctggtattttagcatttatcggcttgattttatcacctgcaataggtgctattttaatgtcactaagtacggttattgttgcaattaatgcctttacattaaaattaaaataaaagataggagttttattatgattaaaaaattattttttatgatattaggatcattactaatattatcagcttgctccaataatgatgaaaaagataaagacactaatgaccaaaaaagtgagagccatatgaagcataatgatgaaagtaaagttccagaagatatgaaatcgactaatgagggtgaatttaaagtgggagataaagtaacgattacagcagggcatatgccaggtatgaaaggtgcagaagctactgtaaaaggtgcgtataaaacatatgcctatgttgtaagttataaacccacaaatggaaatgaaaaagtaaacaatcataaatgggtcgtaaacgaagagattaaagatgcacctaaagatggatttagtaagggcgatactgttaaattagaagcaagtcatatgtctggtatgaaaggtgctacagccaatatagataacgtgaaaaagactactgtttacgtagttgattacaaatccaaagataatggtaaaatcattaaaaatcataaatggatgacaggaaatgagctgaaagcacgataaaaatctagttctaaattgagaaataaatagatataaaaatatcctccttaatcaataatttaaataacttattattgttaaggaggatattttttagtgtgtaaattaaaaagaattttagaagaataacatttatcaaaaaactgttcattaccttattaattgaaattatataattaaaaaccgcatcattagccaatacgcagagccatataataaataatcctgaaaatccacccaatttaaagattaattgggtggatttttagtttaggttaaataatataaagataataaacatgacacttgtaaagcgatttaattcttgtactttatcactaagatttaaatagataatgataggctttttgtttttttgatacaatgtcacaaaggtcttttgaataatcgaattctttattattgattttatgttgctcttttctaatccctttacgatatccatagttattgaatgctattttgtgatactaatacctaatttttggtgtgtataattataaatatcaggagttgcctgacaaatttcattgattaaaagataagttgaataattgcaacaatgattaaaatacttataatccatttttgtatgaagttagggatctttttacttaatttcaaacctaagggagcaaagagaatactccctattattagaaataatgcgtcttcaaaaggaacaaatccctgtataagtttaatgataaaggcaccaattgaagatataaaagcaattactatactattagcaactaccgtattcattggtaatttgaataaaactagcaatataggaataataataaaagcgccgcctgcgccaactatacctgaaatgataccaacgaaaagaccaaccataactaataatggtttgttaaaggaagactgatttaaattcggttttacgttaataaacattaaaattaatgcgagtaaagcaatgataatatatatcgtatttacaaatgcagcattaaataaatttgctaggagtgcgcctaacatgctccctgtaatcatacctccactcatataaataactaatggcggggagaattctgttttttttcgcgcttttaatgacccacttaaagtactgaaaaagacttgactggaagtaagtcctgaagcgatgtatgcactgtatggaggaacaccaaatagtggcggtaataataaaatagctggataaataatgatagcaccaccgatacctactagaccggaaataaagcctccgaacactccaataagtaacatcataataacagttgaaatatccattatttactttttaccaataagttaacggcttcattaatcaattcttctgaattttcaccattatcctctgctgcttttacacattctattaaattttcactaacgataattcccatcaaacgttggattgaactttttgatgcactgatttgagtaatgacatctttacaatctttttcttcttccatcattttaataacgccattgagttgcccttgtattctattaatacgattaatcatttttttatcataatgcatagttatttcctccacttttaattgattaaaatcataataatagatagaatcgaaaatgtcaaataccccatacggtatttgacacggcgtaaacaaactgttaatatacccctacaggtatttattaggaggatattatgaaacaatataacgaaaaccatatcaacaattttagtaaacaagaattagaaaaattgggtgcacaaggtcaactgattgacgttagaacacaagaagaatatgagcttgcacacataaatggtgcgacattacatcctgtagataagattgaatcgttcaataaagataaaaacacaacctattttgtacactgtaaaagtggtaccagaagtgctaaagcgagcgaatatttagctgaacaaggctacgacattgttaatttagacggtggctataaagcgtatgaagcaaaaaacgacgatgataatacattagaagaaaatactaatgtagcaattaaagcagagcgtaaacaatttaactatagtggtcttcaatgtccaggtccaattgtaaacatcagtaaagaagtgaaaaatatcgaagtaggcgagcaaatcgaggttacagttacagatcctgggttctttagtgacattaaaagctgggtcaaacaaacaggacatacattagttgaattggatgaaagtaataatggaattaatgccattattcaaaaagaaaaaccaaaagacttggaagtgaaccatactgccaaaggtacgacaattgtactatttagtggtgagttagataaagcagtggcagcaatgattattgcgaatggcgctaaggctgcaggcagagacgtaactattttctttactttttggggactcaacgcgttgaaaaagaaccaatccgttcatgttaaaaagcaaggtatcgcaaaaatgtttgacttgatgttgccgaaaacacctgtacgcatgccgctatctaaaatgaatatgtttggtttaggtaatatcatgatgcgctacgtaatgaaaaagaaaaatgttgattccttaccgtcactcattgaccaagcaatcgaccaagatatcaaattaatcgcttgtacgatgagtatggatgttatgggcattcagaaagaagagctcagagacgaagttgagtacgggggcgtaggtacttatattggtgatacagaaaatgcgaatcataatttattcatctaattaaatctattaaaaaaggagtttcaacatgttttttaaacaattttacgataatcatttatctcaagcatcttatttagttggctgtcaacgtacaggagaggcgatagtaattgatcctgttcgtgatttaacaaaatatatggaagttgcagatagcgaaggttttaaaattacacaagctgcagaaacacatattcacgctgattttgcttctggaattcgggacgtgcaagaacgtttaaacgccaatatatatgtatctggcgaaggtgatgatcaattaagttataaaaatatgccggaacatacaaattttgttaaaaatcaagatattattcaagtaggtaatattaaattagaagtcttgcatacacctggtcataccccggagagtattagtttcttactcacggatgaaggtggcggctcaagtgttccaatgggtttatttagtggtgactttatttttgttggtgatatcggtagacctgatttactagaaaaatcagtacaaatggaaggtactacagagattggtgcaaaacagatgtaccaatctatagaaggtgttaaaaatttaccagattatattcaaatatggcctggacacggtgctggaagtccttgtggtaaagcattaggtgccataccaatgtctacgctaggttacgaaaaaattaataactgggcatttaatgtaacagatgaatctaaatttgttgaaacattaacatcaaatcaaccagcgccaccccatcactttgcacagatgaaaaaaattaatcagtttggtatgaacatgtatcaaccatacgacgtttttcctagtttagataatgtaagaatagcctttgatcttcgtagtaaagaagcctttcatggcggtcatactgaaggtacaatcaatattccttacaacaaaaacttcattaaccaaatcggttggtatttagactatgaaaacagtatagatttaattggtgataaatctaccgttgagcaagcaacacatactttacaattaattggctttgataatgtagcaggttatcgtttaccaaaatcagaaattttaacccaatccatccatagcgttgatatgactggtaaagaagaatatatacttgacgtacgtaatgaagaagagtggaataatgggcacttagatcaagcagtcaatattccgcatggtaaattattaaatgaaaatattccatttaataaagaggataaaatatacgtacattgtgagtcaggtgttagaagctcaatagcagtgggtatattagaaaacaaaggctatgaaaatgtcgtgaatattagagaaggctatcaagatttcccagaatcattaaaataatttaaagatgtggaaaagtgagtagtcatatcaaattgttattgtaagacaatcagatattataataccaccaagtttatttagaataaatagaagtttaaaagaaatatagatatgattcctaattagtcataatggcaatagatttataaaattaatataaaaccttttctagtggaaatgtagtgagcccaaaaagttttacttntngggctcactacataattaatggttttttactatcttttacattgagataaagtactataattacacgaaatcaattattttaatttataatggttactttaataactatacttataaaatttattctttgattatgaacgagaaagattagtaaaacattatacctattataatgcctattagtacaatagaccaggaaggtaatttataatacaccaggaatacgaataatgagctagctagaacaaagtctaattctgatttaatagttgaagcccaaatcggattataaaatgcagcgataagaatacctactacacccgcgcttataccttttaaaaaaccttcagcataagtattagatttaatatcatcccaaaatggtaacactccaaataataatagaaatgctggtaggaatatagcgacagtagccaaaattcctcctccaataccttctatagacatgccaatatatgaagcgaacgtaaataatggtccaggtacagcttgagcagcagcataacccgttatgaagctatcaggtgatattaaaccttgtggtacaaactcattttctaataaaggtaatacgacatgaccacctccaaacactaaagaacctgatctataaaaactatcgaacattctaagccataaattattcgtcatagaactaactataggcaatacagttaatagtaaaaaaaataatgaaattgaaataaaacctaacattttaggtaatttaaatgtcttcactcttaaataatttttatctgtagaggtttcttttaaaaagataagaccatatataccagtaatagataatgcgattacttgaatataaagattatcgattgttagagataatataagaacaaataatgccaatgtaatggtacttttagtattagttaattttttacccatacctattacggcttgggcaacaatggcaacagctactagttttaatccttgcatccaagttaaactagaatcattgttaataattaatgctgaaaaaaccataagtataatcacagaaggaagtgtaaaaccaataaaagaaataattcctcccagaattcctcctctaatagttcctataccaataccaacttggctgcttgcaggtccaggtaaaaactggcatagcgctactaaatctgagtattctttttcatcaagccattttcttttcttaacatactcatcataaaaataacctaagtgggcagttggtcctccaaatgatagtaatccaagttttaatgcaacaaaaaatatatttatatatttatacataaaaaactccttgtatttagctgattaatttcttacttaactatcaaattctttaattctttttccaatttcgtctctaacacgttgaaattctgaccactctttacctgctggatcatcaaaaccccaatgctcttttttaacgtttggtggtaaaataggacaattatcgtctgcatcgctacataacgtcacgaccaaatctgattgttttaaaatatcattatcaatcaagtctgacgtatggtttgatatatcaatatctacttctttcatagcttctattgctttaggattaacaccatgtgtttcaataccagcagaatagacattccaatctttgcccaatacttcctttccccaaccttcagccatttgactacgacaagagtttcctgtacatataaaataaattgttttcttatccataattaaaacctcttttcttaaaatataattagtgtaaggtataaacctaagagtgtaataaataatactggaatcgttataataataccggttttaaagtatgttccccaagaaattttaacacctttttgagtaagtacatgtaaccagagaagtgttgctaacgaaccaatgggtgttattttaggtcctaaatcagatccgataacattcgcataaatcataccttccttgagtatgcctgttgtttgagattgaccaatcgctattgcatctattaaaacagttggcatgttgttcataatagatgaaaggaatgcagctataaaacccatgcccatgatactactaaataagccgtaacttgaaatatttgttagtacatcaccaagaagcgttgtaatgcccacattttttagaccaaataccacaaggtacataccaatagagaataaaacaatattccatggtgcacctttaattacttgtttcgtatgaacagccttagatttacgtgctaataatacaaatattaaagcaatgataccagcaataattgatactggaatatttataaactcacttattaaataaccaactagcaatacagtgagtacaatccacgagatgttaaaaagctttttgtccttaatcgcttcttttggttctctaatatttactgcatcaaattttcctgggatagactttctaaaataaagccataagacaagaatacttgcgattaaagagaatatattaggaataatcattcgactaaaatactcaacaaacccaatatcaaagtaatctgcagaaacaatattaactaaattactaacaataagtggtaatgatgtggtatctgcaataaaaccactagcaataataaatggaaatatcgcttttttatcaaaacctagactacgtaccattgctaaaacaataggcgtcagtattaaagctgcaccatcatttgcgaaaaatgctgctacaattgcccctaatatcatgatgaaaacaaacatttttaatccattaccgtttgaagccttgaccatatgtatcgcagaccattcaaaaaatccaatttcatctaatattaatgaaataagaataacagctacaaatgttaaagtagcattccaaacaatacctgttacttctaatacatcggaaaaacttacgactcccgtaatgatagcaacgacagctccaattaaagctgtaataccaatatttaaacctttcggttgccatatcacaaaggttaaagttaaaagaaaaatcacaattgctaatattgtcatcaacactcaccttgtttcatacttttacatacacatcgttcgttagatgtattaataagatttaagttatgattaacatcatctaaaatttcatgattaagtcgatacatatgtttattaccttcttttcttgaaagaactaattgcttatcgactaatgacttcatatgatgacttagcgtaggctgtgaaaattgaaaatgttccagtaaatcacaagcacatagttcaccacatgaaagtaaatctattatttctaatctgcttggatcagataaaacttttaatattgttgctagttcttgataagacataaccatacctcccttacgatatatagagtaccatctatatagattattgtctatgttatgtgttcttgtgaatctataggattggggaatgagaaaaaaaaccgcatcatctaccgataagcagaagcgtatcacaaataaaactaaaaaataggttgtgaaaaatataatttgaggtgatttgagatggaaatgaatagttatatgatagagaactttgctactgatgctgttaaaaattattgccttcatacttctaaaattaaaagctatattgctaatgaagataaggaaccaggttatgatggacatctaaaaatttatgattcaatcagtcagactaaagatgattatttaggtaatatacctgttcaaataaaaggaaagaaagcaaaaaagaagcaccctagtttatttaaacaaaataaagttaataaaagggatttggaaatgtatttaaaagatggaggatgctactattttgtagttttaattaatgaaaatggtgagagtcaagtttatggtcgtcaattacttcctatgtatctaaaatataaactaaaatcgaattataataaatgcggttagagaaataaattctttctctaaccgcattattatatgtttttattgctgacttgccattaattcggcttgttctactgctattttctgaagatctggtggatagccatatttctttaataatctacgaacttgtactctcattttagctttggcactatcacgtttagaccaatacccactcatgttatccttaacggttttagttattcatgtgcaatggctcttaattctttatcgcccattgcctcttttgctgcttcatgtgaagctaatgcgtcataaaaagcaatttcttcagtaattaaacctaagtcattacctcgtttttgttcttgcttaatttctttagccatttgaattaattcttctattacttttgaagcttcaatagaacgattattgtatttttgtattgatttacttagcatctcagaaaatcttttagatactgtagcatatgttttcattaatgacttaacttgtcctttaagtaatttgttcaacaactcaactgcaacattttttgctgtaatccttctacatctttcaagaaatcgtcagataaaatggagatatctggattttcaattccgagtgtttgataaatatctacaacttcttcagttacaactgactttgaaatcaattgatttatctctgcttcaacttcagcaggtgtctttttacggttgcttccttcactaggtggagctaataatttaacaagtcctgattttactgcttttaaaaacgcaatttcactattcagtttttgagcagcttcctctgttgcacacaatgctaacctataataatcaatgttcaattattgatacgaaatactatacgacgaccttgccacaatattttgatacaaaaccattcattctagaattttatatcaaatttttacttatgtaaaaaatgaagcactacacttaaaaccagaacgggttaatgtttcggtatggtattgtatgcaaaaactgatgaacgacttgtaacatgcaatacgtttcaaatgagtaataatacgattagtgtaaagacattagatttgaatcaaaattttcttcatattataaacaattgcatgacatcgtctatgagtcctttaaaatatagaataaatagagttgaatatagctttgctttttcattacattaaaaaattttaataatattattattccattttaactttcgctttatcagactcttttttataattttgatacataatccaaagaataattgcccatactggtataaataatacgccaattcttgttgagctattaattaataagattatgaagataaaggcaaagaaagctaaaattgcaaaggccatatattttccaccaggcattttgaatttactgtctttgtgtaatttaggattacgtttgacataatttaaataggcaatcatgataagtgtccaaattaaaatgtttaatactgttgaaaatattgtgatttgaacgaatacttttgttgcatccttaaatattgcatttaaaactacagaaatacttaataaaccgcaagttactaaaattgcataatgaggtacaccatgcttgtttgttttgtgtaagaatggtgggccttgtttacgacctgctaaaccatacattgtacggctatttgcgaaaataccactattacatgaagaagcggctgctgttaatacaacaaaattaataatacctgcagcaaatggaataccaatcagtccgaataattttacataaggactatcagcaggatttaatttgtcccatggcactacagacataatgactgctaatgatccaatgtagaatattagaatacgtgcaggtacattattaattgcttgaggaattgttttatgtggatttttagtttctccagctgtaattccgattaactcaataccaataaatgaaaagatagccatttggaaggccattaagaaaccttgaataccatttgggaaaaagccacttctactccaaaggtttgtcacgcttgcttggccgtacgaagttttcattccaagcacaatcattacaataccaacaataattaaagctacaatcgttgtaactttaattattgaaagccaaaattctaattctccgaataactttgcactaaataaatttaaagcaactaatactaaaatggtaaatgcagctgtaagccagttcggtactgttggataccaatatgcgacatactttgcaactgctgtaacttcagccatacctgaaataatccaagtaagccaatatgtccaaccaaccataaatccagcaattggaccgaggtaataatgtgcaatatctccaaatgatttaaatcctaagtttgataaaagaatttcgcccattgctctcataaacataaataatacaaagccaacaatgacgtaagttaataaaatagatggaccagctaaatgtatagattctcctgacccaaggaatagtcctgtgccaatcgcgccaccgatagcgataagttgaatatgtctattacttaactctctttgcagtttatcttctgccataattttcttccctttcatgagtaatgttatgactgaaatagtatgaatgcattcaaataccctttgttataacctaaataatttttctaaatttcaaatttatttagttaaaattaaaaatacccattaatgttaatcaaataatagattgaataataaatattaataacgattaacgcaatttaatatattattaacaaaaatgaaccttttacatttgccaaacaaattacttttatttataaacaaagtatttcacattctataacacaattcaaatacagaaagtaggataaaaaaggaatgactttaatgagtaattataagattagaaaatttgttaaagctttcgaaacaaaattataaaattccgcatgaagaaatgaatgaaatgattgcaaaagcaacaaaagtgcctctgtcagtaaatatgcaaccatggcgttttgtagtagtagaaagtgatgaaactaaagaaaattacatccattaatttgatttaatacttcataaatgattaaaaaagaattaactttaaataaagcttatggaagtataatttttctttgaaatgattaattcttttataaaggggaataactaattgtatttcataatatggaaacaatatacataatgatgtatttacgatactaatctatatataggagagataagtatggatcaatcaaatgaaaacaaaaaacagaaacaattaaaaaatgtagaaaaaaacaataacgataaagcaatgacgacgaataatggcgttaaagtaagcgaagacgaaaacacattaaccgttggtgaacgtggtcctagcttactagaagattttcattttagagagaaaattatgcactttgaccatgaacgtattcctgaaagaatcgtacatgcacgtggttttggtgctcacggtgaatttcaagtttacaaagatttatctgaatacacttctgcagactttttaacacatcctgaaaagactaccccagtgtttgtcagattctctactgtccaaggttcaaaaggttctccagacacggtaagagatgtgcgtggttttgctacaaaattctatacagatgaaggtatctttgatttagtaggtaatgatatacctgttttctttatacaagatgctattaaatttccagatttaattcacgctgttaaacctgaaccgcacaatgaaatgcctcaaggtggcactgcacacgatacattttgggactttttcgcacaaaacccagaaacaatgcacacggctgtttgggctatgagtgacagaggaatccctaaaaatttcagacaaattgaaggctttggcgttcatactttccgtttagttaatcgtgaaggtcaatcctatttcgtaaaatttcattggaagccagttcacggtttagaatcattggtatgggatgaggcacaaatcttatctggtaaagatattgatttccaccgtaaagatttatatgaagcaattgaaaagggagactaccctgagtgggaattaggtctccaagtcatacgaccagaacaagaatttgattttgattttgatattttagacccaacaaaaatatggcccgaagatgaggttccagttgaaattgttggcaaaatgacgttgaatcaaaatgtatctaatgtttttgatgaaacagaacaagccgcattccatcctggtcacatcgtacctggcattgatttttctaacgatcctctattacaaggacgtttattctcatatacagatacgcaaatatcaagattgggcggaccaaactttaatcaaataccaattaatcgaccagttaacgaagtacacaacaatcaaagagacgctatgcatcaaatgaatgtccataaagggcaaacagcctaccacaacaatgctttgaacaacaacgatcctcacacaacgcctaaagaagaaggcggctacgaacattatcaagaaaaagttgaaggccgtaaaatacaaaaacgtagtgaaagctttaaagattattacagccaagctaaactttatttgaatagtttaacagagcctgaatttgaccataccgtagacggattttcatttgaaattggtaaatgtcaatcagctatggttaaacaaaatgcagtgaatcaactaaacaaagttgatcgtacactggcagaacgtgtcgcagcaaacgtaggtgttgaagtgccagcagaaaatgaagaagtacaaactgatgcaaaagatagtaagttaacaatggaaaaattcgatataccgttacctggacattctgtagcagtattagtgaatggtgaaataaatgaggaaacattaaaatcatacgcaaaaacatttgtcgacaataaactcaactatgcttttgttggacaaactgctaaagatcttaataacaatgagattggtattacagaaacttatagcacagcaagttcaacagtatttgatagcgttattgttctttctgatggtaaagaattgttactaactgctgtagacttcgctgaaatgagctataatcataaaaaaccagttgtgattactgaagaagcgaaaaatatattacaaagtaataaaattgagttagatgcaccaggtgtcgtagtatctagtgaacctcaagcaatcattgatgcatttaaacgatacagatactttgatagaaaataattaatattgccgtataatgagagtggagcctgggatatgataagttgtcccaggcatttttaatgtattagcagacaatgactgaattgaaaatacgcttctatgaagattgtttcaactttggtagaagccctagtattgaaacgttcgtatagaaaacctatgttcaacgcaaggtggagctgtggaccgagacgtgatgacgaattcagaatgaattctgtcccactcccttcttctttttaaattctaagattcgcgtttataatgacatgatttattcgacagtgaagattttgtgtattttttctataaaaagggtaatgaattaaaagagttaattaaaggcttaaaacctatttaaaagtattataaagaaggtttttaagggggggcaaaataaataattattgatattcaaattcaaaaagattatttaattgaagtaattgaaaccattaataatgaaaaattcgatgtaaaattcaagatgcatgtgagtatttagcaactgaaatttgtgaatgaattagaagagcgcaatagtgaggaaacacaagcaaataatttattaggtttgaatagtgaattaagctatgcaatcaaaggttctaaccacgcaaaaaagtaatacttacagtaaatgaaaaagcgttcttatcaagtgatgattatgaagagttacgttcacacaattaaaaagaaaagtataagacaatgtaatacatactttttcacaatgaaaaacccctccaaaggaaatgattttcatctcatttgaagggggttttgcttatattaaattagaaaaataatgctttaactactctgaaaagagaactaaataattgaaagatatcaccagacattagattaaccacctttctctaaatacctattaaagactaagctttttgagtttgagtgagcgtttcactttgaactaaatcatcggctaaatcgtaccaaaattgttgtaattcttcacgtgtacgttttgtatctttactatcttgtcctacaaaatcgacatgatcccagttatgttttgtagatgttacttgccaaatacctttttgatttgtatctgttgcttctgtgtaagcttgattgaaaggatgctgggatgaaataacagaaactaagccatcattttctctccattctttttcagtagctttaccaatgacatttgcagtagctgtgaatggtaagaaaagattatagtccgctttatatttacccgataatgtagagtgtgttgcttcacctgtatacgttttgtaaacgatattaggattgagtgatgttttacggttaagatctgtggcaccatcgcgtgttaaatcgtaaaaagcattatcttttgtttgccatagtttagaagttttagctcgtgaaaggtatgataaataagattctccaggttgttgttttaaaccccattgagatagaccgaagtctacacgagagtatttattaccaagttttttacctagatcaaacgcaatttgacgaacaatggcctcattacccaatttatcagaggcgtgtgtaccattgtgtggtgtacctaatgtggtaattgaagaaaccatattatcttgaccaccttgtagtaaaggagaaatatcaccaccatgtgctttttgatattcaatttcttcttgactaccatttcttaataattcttctaattgacggacagtttgtcctcccatactatgaccgactagatgtactttttggccaggttgccaatctttataaacaccttcgtatgttttaccgtagcgttcatgtccatatctttctgcatgtgcagcaccataatctacagtaccacctttaatataggaataaagttcaactgcacggtcatagttactaccaaacgcactaatgcttgcttcataagcattataaccattttgttccaagtcttgacgaatgtttaatttatctccaccccaataatgtgataaaatgctaggattaatatcgtcagtaaatccattaaaaccatgaacaagaataattggatcttgatttttgtattgaccttgcttagcaggtttgtttgtttggtcttttgtttccgtcgtaccttgttgttgagacgtattatttgtcgtggctactgtattgttagctaacatctctaattctgccggtgagtctttttgatctttagcacctttatttccaacagtttcatttgctgtatcattgattgagatagttccctttttaatatttaaagtattctctttagatgtagtggaatctattgattgtttagttggtattgtttgttttgctgcatttgtatttatgataccattgtttttttcagtagacagtgtttctacatcattattatcattttttgttgaatcgtgatttacatttgaattatcttcagcttttgatgacgtggattgtaaagtttcttcggttggcactgattgaatcttttctgatgaatgattgtcagttatttttgacgtattatcttttgtagatagtgtttttgattcatcagtagtagttggtgttactgaaagttcttgattagttgctttctctgctgtgggatttacatttgcagttgtttctgttgtgttatcttttttatttgaagtttctgtgtctttttgaagtgtgcttttagtcgtttcttgtttttcaagagaaggtggatcctctctagttaaggctgattgagagttatcggaatgtgtttctgtagttgatgcttctgtagtttcagttgattgattttttgtagtttgatcagttaggtggtttgttgtttcttcattagtgtatgatttattcgtgtcatcattaactaaagttgaaggtgtattttcattatgtaaattttgttgtttttcattttcattagttactgactgcgatgtagaggctgtttgttcgttagattgaacttcgttttgttggtgtttctcgttcatcagcttgtttttgattatcaccagtagattgcgctaaagctgattcagaagtacccactctctgatgtgtttctgttgcctgtgcagcaccgccgccacctcccataaatagcaatgtcgctactaaaatggatgatgcccctacactgaatttacgaatactgtatctgttttctctatttttcatgaatagcacctctattaattagttatttaaatatataaattagataaaaatgttgataattgcacggggtataaatccaaagaacttactaaatactgctttaacattttccaaaacaatcagcctttcttaaatcgatatttttaggaagcgcttacaattataaaaaatttctatgtaaaaagaagttacatacgagacttatcaattaacgttggtgagggaatctaaatatatagtagctctaaatgaaagcgctgtcaatattttgtcacaattttataagtaaatatacgctttaaaagcatatagagttaaaatttgtaaataaatgataaaataaaagaacggaaaactaatgaaatagtctgctttttgaaaatcgttatttttatgttttcaaatgtaaatcgaaattttaagcgaacgaggtagcgtaatacgtctccctttcccaagtaacatttgaataatcaaaacattaacatcatcgagttaaaaataatcataagtaaaaagacggtatgatcagctttaatcgaactgtcttttgtacattttatataaaataaagatttgtaatattttctgtataaacagatggcggtgaatcctaagaatgggaatttaataaaaatacaatggttctaggctactaattctctgaatttatagaggctaaatcgcctagtttttgttgaattcgattattattgcaatttttgcatgtgttgcagctattataactgccatatatacaagaaaagcatatttcacgcttaacgcagatagtttaaatgaccatttgcaagaaatgttgaatggatttcttaaatataaagaagaaatagaaaaggtaatgttgatgtttgaatattaaattagtacgctttatcaagatattaataaattttttagatttgttaccaattaatatgaaaacaaacagaacattgaattcacatatagacaatacttaaaaagaatacaagaaaattataataattcgttgggaaaaaagaggtggttttttactaatataggtaatgatgaataaaaaaatatgatgataacaaaatgaattagctatatttaattagaagtacagtaattttatctattataaaattttaataatataaattcatttacttaatgagattttttagctaaaccactaacaaggggaacgcgtcaagagatggcagataagatagttttagtactctgtaattttaggtataaggtatattataaccgttttagtctatccatccatcgcccactcattctattctagcttatccacccgacgcaattttctgactcattccagctttgcctatccacctattgccctttatctacgcactccacctttaaaatctacaatttccttatgcttattcattcactttccctccgtactcttctcatcgttcttttaattcacacatcccttttccttcgtcactcggtcatggcagtttgtaattcttgttcaattaagtcgatatgtttactaatcaaattccgttgttcattcaagaattctaggtgtgcgcgtaaaacgcttgggacatctattttgttttgataaagcatgtctgtgttttttcggatttcttttaatggcatattcaaattgcttaggcactggataaatttaatcatttcgatatcgtcgtctgtgtataaacgcttgttattgctatctctgtcgatgtgtttcaagatattctttttctcgtaataacgcagtttgcttttaggtatattgcaataatctgagacatattcaatgtaatattgtttcatgtaagcatatcctttctcttaaaccaaggtttaactgatattgtactctatataaacatgaatgaggaggaaagacaatgaaaaaggctttaattgttgtaacaaacattgcgaaatacgataatttagacagacctacaggtgcgtggttctcagaggttacgcattttgcgaaggacttctatgatgcaggttatgatgttgatttcgtaagtccgaacggtggatatgtacctattgatcctgtcagtcttagccctgaaatgatgagtgttgaggactgggaatattatacggatcacgattatatgaatcaatttggacaaacgttatctccaaaagaggttaatcctagcgactatcaagccatttactttgcaggtggacatggtgcgatttgggatttaagaaataacaaagaacttaacgacattgcgttaagtatttacaataaccaaggcgttctctcttctgtatgtcatggtgcggctggtctactcgacattaaagaaaatggcgattacctcgttcgtcataaagacgtgactggttttacaaatagtgaagaacaagcaaatggtacaactgaatacatgccatatttattagaagacgaatttattagtaacggtgcacattttaaaaaagaggatgactggagtaatttcgcagtcgtagatggtcgcattgtcactggtcaaaatcctcaatcaggacatgcagttgctgaacatgctttaaaaatcttagctaatcaataattttaaaaaggagcgatacacatgaaatcattaataattggcgctcatggtggcgttggtcaacatctcgtacgcaaactcaaagcacgaaacgttgattttactgccggtgttagaaaagaagaacaagttgaagttttaaaagcagatggtattgatgcaacttacattgatgttgcaaaacaatctattgatgaattaatagaattatttaaaccgtatgatcaaatccttttttccgtcggttctggtggaagcacaggtgacgatcaaacaattatagtagatttagacggtgcagtgaaagcaattaaagcaagtgaacacgtcggtcgtcaacattttgttatggtatcaacgtacgactcacgtcgagaagcgtttgatgcgtcaggcgacttgaaaccatataccattgctaaacattatgcggatgactacttaagacatgcaaatttaaaatataccattgtgcatccaggcgctttaacaaacgaacatgaaatgcaacaattcaatatgagtgcgcaatttgaaaatgtacaaaatccgtctattacaagagaagatgtagcagaagtgcttgtttctgtattaactgatgaagcattacaaggtcacgaattccaaatcatcaatggtgatttgtcattatcagacgctacgactaaatatctggaggaataataaatgaataatcaacaagttgtacttgcaaaacgaccacaaagtatccctcaagacgatgtatttagatttgaaacaatagaaactcgagaaccacatgcaggtgaggttcaagtagaatccatttatgtatctgtagatccttacatgagaggcagaatgaatgatacaaaaagttatgttcaacctttccaagtgaatgagccattacaaggtcatattgttggaaaagtcacacaatcgaacgatgaacgtctatctgtcggtgattatgtcacaggcatgttaccatggaaaaagataaatacagtgaatggagacgatgtgacccctgtgccatcaaaagatgtaccattacatttatatttgagtgttttaggcatgccgggaatgacggcctatacaggattgcttcaaattggtcaaccacaatctggcgagacggttgtcgtgtcagctgcatcaggtgcagtaggctctgtcgtaggacaaattgctaagattaaaggcgcaaaagttgtcggtattgctggtggtaagcagaaaacaacatatttaacagatgaattaggatttgatgcggccattgactataaacaagatgatttcgcacagcaactcgaagcggctgtaccagatggtattgatgtgtattttgaaaatgtaggcggcgcaatttctgatgaagtgtttaaacacttaaatcgatttgcacgcgttccggtatgtggtgcaatttcagcatataataatgaaaaagacgatattggaccacgtatccaaggaacgttgattaaaaatcaagcattgatgcaaggttttgtagtagcacaattcgctgatcattttaaagaagcaagcgaacaactcgcacaatgggtgtctgaaggtaaaattaaatttgaagtgacgatagatgaaggttttgacaatttaccttctgcatttagaaagttattcacaggagagaattttggtaaacaagttgtcaaagtcgctgaagaatagcagaagactatgaaaaatatcatcgtaagattcatatttagtttactgttttataaaagtggtgttgcacactttaaaaataaagatatgtttttaaaaatcgtgccgtcctatttacctttcaaacacgcaatagttaagtattcgggcatattagaatttataattgctttttatgtactcagtgctaaaaatagatcacgcgtaagaaaagtagtacaaggattcctttggctcgtatttcctgcaaatatttacgctgcacgtaagaacatctcttacaaagatgaaagagatgaaacagatagtgttaagcagcatgtcattcgtttaccattacaatttgtcatggtcgcacttgcgaaactattataagacttatcatagccacgcctggaacattacttttgttccaggcgattttttaatatttacacttaaaatcgacgtatatcaaatgattctcttgacaacgcttatgtgctctttgtttaaataagctcatatcagacatttacttttcaatttttctatagtgataagcttctaaattaagaaaagcataagttaatttgcgtgtatgagtgtaagaagaaataaaaaatgtattttatcatgtgatgctatcgcaacattgtaacattaatgtaataacgtgacctgtaagacaaatatgaggagggtttttatgaaaaaagtttctaactttattttagctagtagtttagttttgggctttttcgtaacgcccgaattatttaatatcactcaagcacatgcgcaagaatctgtgaaaccttattatagttacagtggttatacagcaaatcaaagtaattttattctagataagaattttaaaacatctcaaaaagctgataacttcaagattaataatcacaagattactaaaaatgcattagctaaaaataataaagatttacacgatccaacatattacggggtttctaatcataaaacgaatggtgttttcttcttattagacggtaagtcagtgagcaaaaaaaattattgaatcattacggtgaagcaaagtatacatctacatcagcctgaggcaaagaatatatgtataaaatagaaaatgatgacttttaaaatataaagttgtagtagatacattgtaaaaataaacttaaattgctcaaatacttttcaataatatcagaatatatattaaatcgaaagtgattatatagtaccaaagtagatatggtactaattccagcttatacaggaaaggggaaagagtttttttatactagtgacatcattaaagcaagtaagattatccccttttttagataattgtgatgattcgtagacttaattcataattcttgctaataaagattgaaaagctttaagaagggtacaatattaagtaagagacttggagctcttgtcaattaagataatgagcaagtgagctcgttaagttaaagatgagctgaggtaaagtttacctgcctatctttttctatttggaggctaaatatatgaaaaaaatattattaacaggtgcttcgggatatatcggtagtcacttaatgaataaattaaaagataactatgaaattatagctatttctagaaatatagaaaataaatcaaatgaacacaatgttacttggaaggcagctgacttgtttgatttaaatgaaatcactgaggtaatggaggatattgatatcgctatatatcttgtccattctatgatgccttcagctaagttgacgcaggcgagctttgaagatatggatgcattattagctgataattttgctaaagccgcaagttataacaaagttcagcatattgtatttatgagtggtttgatacctaatacaaatgaattatcaccacatttaagaagccgtttagagtgcgaacagattttaggatcatatggtgtaccagtaagtactttaagagctggtttgattataggctctaaaggaagttcttaccctatattaaaaaaattagtagaaagattacctggcctgttactaccaaaatgggcttataatacaacattgccagttgcaatagacgacgtgattgacggtttatataaaattgtagagcgtaatccaaatgagaacgaatcgatagatattggtggacctagtcatatgacttataaagatctattcaagcaaactgcagaggtactagataaacgattacctacgatagatttgcctattattcccatttggctaagtaaatattgggtgaaacttatttcaggtgttccaaaagaaatggtctatccgttaatggatagcttaattcatgatatgattagaaatgatgaaaatattgtgaaagacatttctataggcaagattgattataaggaaagtgtgcgtaatgccttggaagaagaaactaagacacaaaagaaagggaagtcatcacgtaagggcgatattaaagatgttagagcaatatcaagggtagtcttacctaaagatgtaaatatgattcaattggcagaatcatatgcaaattttttaaatagaattacattaaatgtcgttaatagtgattttaacgaagataactttacgattagtgtgccgtttttaaataaggacttactattattaagtaaagattttaaagcttctaataatgagagaattttatatcgaattgttggtggagatttcgctttagattcagatggtggtaatgcgagattagagtttagaagattacctaatagtgacgcatgtatcatagcgttacaagaatatgaaccgacgttaccttggtgggtatataagtatacccaagcaaaagttcataaaagtgtaatgaatctttttaaattcaagattaatagccaaaaaactaataaaggagaatactttaatatgaagaagtttattttgccagttgttattacaggtgcaattgttttgaaagtatatggattgaaaaagtatttagctagaaaaaataacatgtctaatgccgaactatagctattagatataatagctagttacttttacaaaaaaagaggggatcaactatgaaagcaaacgagataattaaaacaattataaaagttataacaccaattacaggtggtaaatttatagggaaatttgcagtgaaaaacgcgagaaaagattataaaaataatgttaaaccacctttttcaccacccggctatgtctttccaattgtgtggccaatactttatacaacgatgggcgtagcttatgcattagtgactaataaatctactagtaaggcattgaaaggtgcttattactcacaattaagcctgaattatctatggtcgatattatacttcaaatataaattacgctttagtgcgttgatagagagtgttgtattactgggcgcagtagttacaacaactgtaaaatttttcaatgtaaaaaaagttgctggcattttactagttccatatatgctttggagcgcttttgctacttatttaacagctggtaattggtatttaaataaagataacccaagctatacagcgaaatctgagcattaaattgatgaaaaagattatatatattgcgctatattggtttatagttcaaatgattattgctcaacttggtactcgtattagttataagttcttagaaaaagataataagtattttcgaagttggaatattgaacaagagggtcaattatggcaacaattagttaaagtgcaatattggaaagattatttgccagatggtcaaaatcttaaccctaatatcagtagtaaagcgactttcgatttatctaaaaatatgaatgatatacagcgatttatattagaaactagacgtgcagaggtggttcatctgctatccatatttcctgttattgcgttttttaaagcgtcaaaaagtgttaaaataattaattttatatatgtcattatagctaatgtgccttgtatgattgttcagcgctataatcgccctaagttaatacgtatttataataaagtacaaaaaagaaaaggtgattaaatgggaaataagaaagtggttgtcataggaggtggcttgggagggattgctagcgcaatttgtatggctcaagcaggctatcaagtggatttatatgaacaaaataagcatatcggtggaaaggtaaataggttagacatagatgactatggatttgatctcggtccatcaattttaaccatgcctaaagtatttcaacgcttatttcaacgatgtgatgaaaggctagaagattatgttagcattcgtaagttaagtttacagattagaaacgtttatccagatggccaaattttagatttatatgaatccatggaagatatgttaacaaataatgaatcgttaacaaataaagatatagagcaactttcttcgttttttagttacgcacaaaagatacatcaagttgctgaaaaaagctactttgataagggattagatacgatgtttgcaattattcgttatcatggtccgttttcagctttaaagcaattcgattattttcacacaatgcaacaagccattaataaaagggtagataacccatatttaagagaaatgctaggttatttcataaaatatgtcggctcctcatcttatgatgctccggctgtattgagtttattacctcaaatgcaacatgaggaaggtttgtggtacgtagatggtggcattcataagttagcggaagcgatggaacaattagcgagaaaattaggtgtgggcatacattttaacacccctgtaaaacgtatcaattataatagtcaaaataaggtgacagggataacaatagaaagtaataaggaaatatatgcagattacattatatctaatatggaagtagtccctgtttataagtatttattgaattttgatgcaaaccaaataaacaaattggaacgtaaatttgagccagctagttcaggttatgtcatgcatcttggtgtggacaaaagttatccagagcttcaacatcataactttttcttttcaagtaattctaaagttaattatgatcaagtttttcaccagtatgttttgcctgaagatccgactatttatgtagtgaatacaaataaaacagataagacacaggcgccagagggacacgagaatataaaaatattgccacacataccgtacattcagagtaagtcatttagtgaagcagaatatctgcaattccaagaacgtatattggataaattagagtccatgggcttgaaagatttgagaaagcacattgtatatgaagacgtatggacaccacatgatatagaaaatacatacaattctaataaaggagctatatatggcgtagtatccaataagaagaaaaataaaggttttaaatttcctaaaaaaagtcagtacttcaaaaatttgtactttgtaggtggttctgtaaatcctggcgctggtatgcctatggttactttgagtggtatgcaagtagcagaagctattattaatggagaaagtagttgaggctgaatgatactttatataatagcaatagtattgacgatactatcactaataagtggaatgtgtatgtatgcgcgtcgagcgattataaataactccggaaaaggaagaggtcagacagccgtcagtgttattgtacctgctagaaatgaagcggagaacttacctaaattacttaacagtataagtaaagagcaagaaatagaagtaattgttatggatgatggttcaactgatgagacacaagttgtcgctagatattatggtgcgagcgtatatactgttgaaaatgatactacatggcaaggtaagtcacatgcttgttggcaaggtagcaaatatgcaacgcatgatttattaatgtttgttgatgctgatgttcagtttgcttgtgatgatagtattcaaaatatagccaatcaatatgatttacaaggtggtaaaggtttgttgtcaatacaaccttatcacaagataaaaaagctatatgaaaatatatcggcgatttttaatttaatgacaatcgtaggtatgaatcaattttcaatcacgaaatcagcaaataatgagcaaggcgcgtttggaccagtccttgtgacaaataagcaagattataaattgacacaaggacatttgaaagctaaaaatcaaatcattgaaggctttgcaataagtaaagcatataatcagcaaggtttgccagttagtttgcatgaaggccaaggcgtagtgaattttagaatgtattctcaaggatataaatcgctattagagggttggagtaaacactttgcacttggctctcaagtaactaaaaagtctacgcttacgtttgtatttttatggctatttggttcacttacaacagttttagcgataattttttcaattaatttaggctcgttatatatattattagctattactctatattttatatatgcgatacaatttcatatatttattcgaagaacaggaaattttaatatcgttgcgagtttatgtcatccactgctcttcatatgctttgtcgtgatattttttaaatcatggttagatatcaatgtattcaaacgtatatattggaaaggccgtagaatagatttatagcttagttttttatacaaatgtcacgaagttctaggcttactgaggaggccaataaatgaatcaattagagagagattataaccattgtcacaatataatgaaagaacattcaaaaacgttctcatatgcctttgattttttggatttaaaaaggaaaaaagcaatttgggctatttatgcagtttgcagaattatagatgacagtattgataaatacaaagaccttgagcaattaaacggcatagctagagatttagatgtgatttatagcgattgtgattatattcaagcgtatcaaagtgatgcagctattatgaatgctttaagtaatacattgaatacatattcaatacctaaaaaaccttttgaatctttaattcaatatgtgaaggaagatttagttttaaaagaaatgaaaactgattcagatttatatgagtattgctatggtgtggcaggtactgtcggtgaattgttaactcctatattaacttcatcaaatgaaaataatttcgagcaagctgaagaagctgcgattgctttaggcaaggcaatgcaaataactaatattttaagagatgtcggcgaagattttcaaaatggaagaatttatctaagtgtagaaaaattagctcaatatcgagttaatctacattctatatattatgaaggagttacgccaaattatatagaactgtgggaaagttacgctacagagtcagttaggttatatgatattgcattaaacggtattaattattttgacgaagaggtacgttacattatcgaattagctgcgatagcttatcatgaaatacttgtggaagtaaggaaggcaaactatacgttgcataagaaagtatatgtaagcaaattgaaaaaaatgaaaatttatcgtgaacttagtgcgaaatataataggagtgaaacattatgaagattgcagttataggcggcggtgtttcaggtttagctgcagcttcaagattagcagcaaacggtcaccaagtagatttatatgaaaagaaccaacaaataggtggcaggatgaatcagatcaagcaagatggatttacatttgatatgggaccaaccatcgtaatgatgcctgagatttatcgagacgtttttaattacgctcaaaaaaatatgaatgattacttggaaattaaacaattatcacatatatatgatgtttattttagtgaaacagatcaaattcgcgttcctacagatcttgctcaattaagagatatgcttgaaagtattgaacctaactctacatatggttttatgtcctttttaacagatatatacgaaagatacgaaatagcacgaaaatattttctagaacgtacgtttaggaaacctacggatttttataatccttttactatatatcaaggtatgaaactcaaaacatttgataaagcagataatttaattgaaaaatatgttgataatgaaaaaatccaaaagattttagcgtttcaaacattatatataggtatcgaccctaaacgaagcccgtcattgtattcaattatacccatgatagagttaatgtttggcgttcactttataaaaggtggtatgtatagctttgtcagagcgcttcaaacgctaaatgaagaattaggtactcaaatttataccaacgcaaacgttgaagaaattatcattgatagtaggtataagcgtgcggagggactaaaagtaaacggacatatagaaaagtatgacaaaataatttgtactgctgattttccatatgctacttcatctttaattaaaaatgaacatcatcctaagaagtatacgacacagaaaattgataatatggactattcttgctcagcctttttaatgtacataggggttgataaagatttatctgaagatatcttgtgacataatgttatattttcaaaggattttgataataatatcaatgaaatattttccggggaaatatcccaagatccatcaatatatgtatacgctcctagtgtggaagatcagtcgttagcgccagaaggtcaaacaggtatttatgtgctgatgcccgtttcagaattgaaaacaagtaatacggattggtctgatgagtcaacaatcacacaagtgaaagatattatttacaataagctttctacgattaaagcgttaaaagatttgaaaaagcaagttgtgacagaaattatttatacgcctaaggattttgaaggagattataatgctaaatttggagcagcctttggtttaatgcctactttagcgcaaagtaactattacagaccgcctaatgtgagcagagattacaaaaatttgtattttgctggagctagtgttcatccaggggcaggagtgccaattgtactgacgagtgctaaaattacagttgatgctatgttagaagatattaatagtggtatataaaaaacgggagtgggacagaaatcaaattttctaatatagatttcgtagtcccaccccggcaagggtgactaggattgaaaaaagcttgatataattgcattttcaattcagtcacctactgccaaattgaaaacgagcctgagacatctatttatgtcccaggctcgcctttttaactaatcgaacgtaatggtttgtggtgcgtctaattttttatcgttcataatttttatggattttggtattactttaattacacacaagtttggatcatccttagagtcaaaaaaggacttatcttgtttgttccaaatccaatcaatagtctcttgatctttcagtattttaacattagcatcaatttctagaaaactacgattattcgtttcatcgtaacctataagtacatgagctttgggattatctttaaattcagcaatttttttagactcaatgcttgtcttagtataaagtgtgtgtccatcattataaaataccatgtatctactattaggtgtattgttatgtgcagtagataggacccctatttttgatgtatttaatatattttcaatttcattttgtaattgttcgttattcataatttaatcacctctgataataatataccctgaagttgcctataatatgtaaggtattaaaatttattttattttttagtgaattatacaaaagttaaaacgggtatatgattgaaaacacaatcttaagttaaaggacaattataaagtgaatttgtatgaaacaagctgggaggcaataaaatgcatttaggagtcatacttaacagagtttttagaacgaaagataatccactttttcaatatatagtgaagcatcaaaatgagataaataaattgtattttatcttacctttagaagatttaactgacgcatcagaagtaaaacgtgactattactataaagttgtaaaaggatttgtaaatgctttagataagcatgatatacaaccttatattgtcacatacgaaaagctaggtgaattagcagaaacattggcgttatctcacgtattagtagcaaaagatattatgagttatcacaaagaaatatatgactatcctcatgtaaaaaaggcttttgaaaatcaccaagttacagtaattggacagcgcgtgaatcattattttgagccaacaaagacttttaataaacagcaacagccttataaagtatttactagtttttataaagcaaatcgtcaggacttagtacacacccctaaaaaaagttatcaatttaagcagttgtctcaaattgcggaaaagggttcaaatcaaagtgacttaaaatttgaaaataataaagatatagaaaagttagcccgtaaagcttgggatgattttttaaatggtgacatagctcattatgataaattgactgacgatgtgtcgcaggattttgtaagtggattaggtaaatatttagcatatggactactcgatattcgtgaaattataaatgatttacttgaagattatgagagcgatgaaaaaaattatgaagcttttataagagaggttctattccgtgaattttattatgtgttaatgacacagtatccagaaacggcaactaaatctttttctgaaaaatatcgaaacatgcaatggtcgtataataaaacacattttgaagtatggaaaaaaggtcaaactggttacccaatcgttgatgctgcaatgaagatgctgaatcgtacaggatatatgcataatcgcttacgaatggtcgtatcacaatttttaacgaaaaatttatttattgattggacttggggggaggagtactttagacagtatttgatagattatgataatgcatctaatgtacatggatggcagtggtcagcatcaactggaacagatgcagtgccttatttcagaatgtttaatcctatacgtcaaagtgagcgttttgatgcgcaagggtattttattaaaacacagctagaaatatttaatgatgtgagcagtaaatacattcatgatccaactaaatataaagacaagttacaagaaatttatcatattgaaattggaaaagattatccacagactatcgtgaatcataaaaatagtagagattatgttatggataaatttaagaaattttgacatatcatccaataaaaaggagtgattcatttgttgaaaaatgaaatacatcgtatttatttagaaaaaaataataatgaggtaactattaatagatttaatgcgacatatcactatactatattagaacaaattaatgatttgccacaatatggttatgcagttttaaaccatttatatgctaatcctggtttagaggcagacttcgagcgtgtgttcttaaatagagataaacatctagagaatactgaagggtttgaaaatctattatttctaaagccacatagtactcatgaacatcatgttatcattacgttttggcaagacgaagcagcttacaaacattggcaagagtctcaggaatataaagcatcccataaaaatagaggaaccaagcaaggtgctgataaatctattgtaaacagaaacctatcatttaatattagtttagaatttaaataacataatttttgaattaaatgatatttctgcaaacatataggcgagttatttaaatactaacttgcctattttttaagcgatataaaaattttagcaaaatcactgataaggggaagcgtatcacaagtgatgggagctaatattaaatagtaaaataagaaaaggggagaatttatggtaactaagaagcaacattattatccaagatgtttattaaaacatttttcagatagtcaaggtgaagtaaatgtatacattcatcaagctaataaactaactaaaatgaagtatgaaaatatttgcgctgcaaactatacgtatgagagtggaaatactaatgataatattttagaacgaaaattaggagtatatgaatcgaaggcgtgtccaatagtaaactatatattaaataatatagatttagagcaatttactattacagaagaacaacaacaaattttatttcagtatatgtttttacaatctttaaggactgatgcggggagaattaattttattaatttaattgaaaatcatttttcatatgaaccgagaaatactcctattgaattagatgaaataaaggatagtggcgaaaagataaaaaaatttaattggatatttaaacaggaaaacgtgttagaagaaattttgaaagaattagaaaaatcagaagaaatgaattttcatatagctataagtcaggataatctattaacaagcgataatccgataattggaaccgatgaaggaagacaaatcattctcccaatttcggcacatttttgtatcgaatttcagcatgattcaattaattgttcaaaggacctaattgtgatactgaaaccagaaaaaacacgttatataaatgaagcaactattaacacatcgaattactatattatctcaagagaaccttttaatctcatacaaaacaattatatatataatagatttttaaataaagattggacgattggttttcctcatatttcttaaaagtctatttttttgataatataaaatgatatgtaaaattaatataaaaagactcttgccaatgatggttagtctataaaaaataaatacattttgatacatcaagcaactcgattttgttgtttgatgtatttttaatgttttgagacaaataccctagaaactataaggattctatttctaaagataataaaattatgattttcgtaggtatatctcgttataagtactttgccaacttttaaaaagtcgaaatggatgataatgagtagaattcttcatacatctatatcatcaacattattaccttcattacctattactacttcatcctctatagtttcatcctgttgagtaggttctccagaggggagattgaaattttccttatcaagctaattcttctaattctagtgtcacttcatctacagtagtgatttcttttgctaaattaagttccttattaccttcagtgctattaatctcttctgttgttcttaggatttaattactagtactaatgcttgagttcgtgatttgttgatcttgattactttgtttatttttcactttatgttttttctgtgaatttcgtttcttcttttttagttctaaatttttataactcctgtatgtaaataaaactgaaacttcaatatcataacaaataaaatgacactcaaacttactaagactttttcaattgctaatgtatgtaatttacgaggttattgtatagaatttagagttatactttgcatgagtaattatcttttataggagataattcaaaagaatttctcgaaatatatttaagaagtatattattttgttgttcaaacatttataatttaaatatatagtagtgattgaaaatggaggggtagttataatatgaatttaacagataaaaaatatgataaatatgttggatatatagaaggacaaaaaaatgaagggcacagttggcgagatattagagaaatgggttacaaaaaggatgatttgaagtcatttattaatacaatagcgatggttttttcagtagaggaaattacaacagatgaatggaaaaatttggttgatataatggaagaaaaagaaaaaagtttagatattaaaaaattaggtgagaatatattaaatgatgcagaaatacctagttcaccatactcatcatggcaattatataaaaatagattagaaaataatggattttccaaaaaatcgattagaagtattgaaaaatcctcttttgatattttaaaaagtttatcgatggatacaactgaaagtggtcctataaaagggttagtagtaggaaatgtacagtctgggaaaacagccaacatggcaggattaatgtcattagcagcggataatggatttaattattttattgttctatcaggagttatagaaaatttaagaaaacaaaccgcaaatagattatatgaagatatgaatagtagtggaagaggtaatctcaaatggaatcatgtcgaaaaccctaaaactacttcacgtttccctgaacataatattagtaattttaatttgggatctaaagataaagatcgctattttactgtttgtttgaaaaataaaagtcgcttaaataaattaaaacgttggttattgtcagataaaaataaagcaaaacaaatgaaaatattagtgatagacgatgaagctgaccaagcaagtattaatacaaaaaaaattgaagaagaatattcaacaattaatgctttgataagggacttagtgaataataaacaatttgcagcaatgaattatatatcttatactgcaacgccttacgccaatgttcttaatgaaactagtgaaaacacattatatccaagaaactttattaaattgttagaaccttcagaagattatataggtccaaaacaattgtttggaagtgaaataccagaaagaagtcctaatatagatattgttaaagaaattaccaatatagattatgaaataattaatgaaatacaaaaaggtgactctaacgaccccttacctataagctttaaagaatcaatccattggtttttaatttcagtagctactatgagagtgttaggtcataaaaaaccaattagtatgttggttcataccagttttaaaataaatcatcatgagattattgcaagaaaaatagaacaatatttacaacatgtaaaagaaaattttagtagtgtagtaaaaatgatgaaaactcaatatcaatatgaaaagaacacattaaatagagacatttttcttgaaaatatacctgattattctacaccagagaaagtacctaactacccacaatgggaagatgtctatatggaactcgaatacttgttagatgaaaataacgaagtctctaatatattattagataatgagggggaaccaatttttcacactggtgtccatttagctatagacaatagtagaactcgaattgataatcaaacggttcgacttatttatcccaacaagactaatatgcctgaaaaagcaccagcatttattgttgtagggggaaatacattgtcccgaggtttaacattagaaggattaacaactacttactttttaagaacaaccaatcaagctgatacattaatgcaaatggggagatggttcggttttcgaaaaggatatgaagtaattcctagagtttggatggaccaaatggcattaaatagatttacgtttctaagtcaaatgaatgaagaattaagggaagaaattcaagtatatgctgaaacaggcagctcaccaattgaatacgctcctcgaattaaaaattctcctaattataagttaataagaattacctcgaataataagcagcaatctgctgaagcgcttgaatttgattttgcaggatttaatagccaaacaatttattttgagagagataaatttaaattagaccataatttctatatgacacaagattttttaaattcattgacagaaccggagataaagaaaaacaagctgatatggagaaatgttagctcagataaaataaatgaatttttaactgagtataaaatatgtaattctgatacaaaaatgggagcgataccagttttaatagattggctagaggataaaggtagtgaatttgagaaatggagtgttattttatcgagtactggggatgtaaattctccagaatatcctactagcgattggaatattcatgggtatagtccagactcagtaattcgctctcaattatctaaaagagctaatgaaaatgtagtaagtattggttcattgagaagacctgaagacttatatgcagatatagatgtagaattatcaacaagggagactagttcagctaaagtgatagatgttaaacgaactagagaaaagtataattatggtaatgttccacaattgataatttatagaatagataagggagaaaagtcaaaaaataaaaaatttaataaaacaagagaggcaatacaatttgagcaagatttaataggtatcaacataatgcttccaggggtttcacaaaatgaaaatatgactaaatatatttcagctaaattagacttaaaagatcaatatatagatgaagagatatttgaagaagaggatgtggattgaaaatgaaattaaaaaacgcaccaaatgatgcacaaagtatgtctcaagatggtgatgcgattttaaggtcacttcaaaataagagtttaccagttattgatttaatggttagagaagcattgcaaaatagtttagatgctactataaaagacgttagtgaaactgaaatagaattttcaattaataaatttgaaacaaagcgacttgcttcacattttgaaggagtcgaagatgttttaaaacaccgttataaggaaaacgaagaatttattgcaatatctgataaaaatacttatgggttaactggtgattacaaatcaagtgatgcaaatattttaaataaaagtaattttcataaattagtttttggtattggtaaaaaccaggaagcagatggtgctggtggtagttggggtttagggaaaactagttttttcagacttggaattggtatcgttatatactataccagagttaaaataggaaatagttatgaagaacgtttaattgcatcattaattgaaagtcctaaacaaaataatagaattttaccaaataatggaagaggcattgcatggtggggagaatatccatatgaggaacaacttcaaaatatgcctattttacctatcgttgatggggataaaattgaagaaattttagaaatatttagtttggaacgttacacaaataatgaaacggggactactattattgtcccatatgttggatgtaacgagatgtttactaacaattcagacgaagaaaaaatacttccatgggagacaagttacgagttgagtattagaacagcagtagaaagatggtataaccctcgtctaaataatgaacaatatcgtgaacatgttggaaattcatcattaaattgcaaagttaatggaacaggttttttaaggtcttataatacagaacctacatttgatattatgcatgatttatatacgtcagcgttagtaggatcatcaaaaaatgacgaaaaaattattgtaagaccagttttcctaaagcgaaatggtatgaaagatcctagtaataatccagtaggctatatagcatttaaagaggttggtcgagaagaattaaaaatgaatccaccagaaaataagctatcagcattagaatatattggtagtaaagatcaaagacttatagatttaaatagttcaaagataattgcgtattgtcgtaaaccaggtatggtagttgaatatagtatagatggtgactgggcacctaaagctaatatattaaatgaagatacattattactaggattttttgttccgaattcacagggtgaattaatagatagttatcaaaaagaggggtactttactttagaacaatatctaagagcaacagaaaatgctgatcatgctaattggatagatgaggcaaacaaagggataattagaaggataaagagtcaaacatataaaacaattagtgattattatcaagaaatgtctggagaaaaacaaacatctgcaacttcgggcctttcaagaaaattcgggaaaatactcttaccacctaaaaattatggtaaaacatcagctaaacgtaaaatagaagaaattgaaaaaagaaattcaaaaaataaaaatagagtgtctgatattcgcgttattaaatcaaatcccattgatgagcgaacagtggaagttaaatttaaatcatctataagaaaagaatcacaaaataaagtttttttacaggtaatgtctcaagaaaagaaaatggatagaaaagattgggaaaaagcaatgggtgaatcaatggattttccatttgaaattacagatttatatataagtacaatagatggtgaagagataaaaaaatatttttcagattttgatgataatgaactgaaaatataccaaaaatcaaatgatttaaatgaaatttacataatttcaactgttaatgagaggatagaattggaaggaacactaacattaaagtcgctttcaacagaatttatacctaatatagcaatatcttcagagatatcggaaggggaagtagagtaatggtgcaatcagtaaatcaaatagcattatataaaaaaatagacgaagaattactagatgtagctggaattaatttttctcctgtcgagctttcatatgaaaatattacaaataacgaagaaatatctatagacgtaaaaaactctgaaacgatggaatttcacataaatgagtttgactcaatgtggtcaccaaaagaaaataacttaagagtagaacaagtagtaacaattgattccccttgcaaactatttggtgaagaaggagttacttgtaatggtaatgttataggtttcgctgcacacgtacactctaaagagtctggatttcaaaaaaccgtgaattttgattcgataagaaatcaagaaggtaaaaaagaaataagaattgattatcaattcccatattctactattagaggaatagtacaccttgatttctttttttatcttaaagaggtgaatgatacactgccttattttgcaaataaaagtgggatgttactttcggaagaaaaccttaattcaattgacttaataatagatggggtcgggtcaagctttccaatgacagaatttgaagaaaaagatggaccactttggaaaattgatttcaattgggctgatccagaggaagatatatttgaagtatcaaacataaatgtagcattaaatattaaacatcgactgttcccagaattaaaaaaagaaactagaataataaatcaagcgatgatgatgagtataatgattcaagcaatgtcattaattactcaacaagttgtgataatagagaagtacaacgttgatgatgaagatagcttaattccaggaacaattctttctgctgtatcgtattgggtgaagacttttgaaattgaaacaactaatattttcacaatacaaaatagctttatgagaagtctcgacagtcaaaacctaggaggtgaagatagtgattaattgggaaaacattaactatgatttaaataatgctaagaaagattttgataaactacaagtattatctaaagaagtagctccaatagacgttccaaatgaatttgaagatttacgacaaaaactattgagagctagagatgatatttttaaagaatatcaattagatggcgtagaaaagttagattacaaatttgatttactttttggcattaatttatttgaaatattgaatgaaaatataaaattctataatagagatgccatgaacgatgatttatggagatatctatcaattaaggttatacctgatatagtacattctagatggggatttaatgaagatcactattttaaaacatcacgtcgaatatggttgaaaactatttggtggtatataaatttatcttggacaggaaatattgaaagtacttatcgattattagaaaataatactactgatactattttgcaacttgttgaaagacctggtattggttataatgtggaaatgtatcgtgaattaatgaaacaatacaatagttatagtgatagttcaaggcagctatttagaagagtattgaagttaaatacggccagattattgacaacttctcctgaattagttgagggtggaattcctcaatatgtagaggatttattcaaagcagtgagggattagtatgaaagtattttatgaaaatttatattcagaaataataaaaaattcatttcctcaatatgaaactttagatgttatttctggatatgcttctccaaactttttgttaagaataataaatgactttcctaatagaagaataaacttatatattggcatgactcatcaaggaataccatacaatgatttctttgcttttttaaatatttgttcaaagtatccgaaggtaaatattttttatcaaattgaaggctcccctacacatatgaaagtgttagagtttagtaatggttttgataggaaaacttttgtaggatcagcaaatttctctgaagcgggttttttgaatcacagggaagtaatggctcaagttgaatatgatatacaagaaaaagtaagagaacaaggtagactttcactacattgtatggatgttaatgtattaaattatataacactaataaatgaagagctaagcaatgaggttgaaaaattagagagatttgagaatggaatagaaagaagtgaaaatcgtttcaaagaaattcacgattgtgtaaaatcattcaatttagaaaatgatataaatttaaatggagaacgcaatgggaacctagtatatttatctttgccaataattcttaataatgaggcttcgaaaggtatagtagtcgcaaataatccaactgatggttacattagtaattctaatctacaacgaaagaaaatggttggatttttcaaaagagaccactctttcaaagtaaaaacattgcataataaagaaacacaagcagagttaagaggatcttttggaaaagaactatatttttatgattttgatttgaaggaatatatacatcttttaatggggaagcctaaaaataaaataataacaaatgcagatttactagagtttggttatgatagtttgttttttaaaaaaattagtgacaatgagtttttaatgactttacataatagctctgaaatttaagggaggtgctatattattttaaaagtgattgaaacatttagtggtattggtagtcaagcacaagctctgaaaaatttagggttcgatttttctgtagaggctattgttgaatgggaaattggagcattatatgcatatgatattatccataatggacctcaaaacttaagaccatatagacatcatactaaagaatcaataattaaaattttatctaaatataatctgtctaatgatgggaaagaagcgctctcttcaagagcaataagctctatgagtatgttacaacttaaatctattttagcttcaatcgatagaacaaataataaagtggatataactaaagtaagagctgaagatttgcctgattcagatttattaacttattcatttccatgtcaagatttatcagttagtgggtattggcataaaaatgcgggtggaataaatagagatgccaataatcgaagtacactcttatggcaaattgaaagattgcttaaagagtacaagcaaagcaacaaagagttacctaaatttttacttatggaaaatgtaagcaatatattatctgataagcataaagataactttaatgaatggtgtgactttcttgcagaattagggtatgttaatcaaatatatactctagactcgaggaatttcggtataccgcaaacaagaatacggacttatatgattagtgtcttagcggaaactgatactattgctttaaatataaaatctttttttgaaaataaaaatttagaagaaaaagttatgcttccagagcaaataaaagacatctccaattatttaagactaaattatagtaatgagctatataaacaagaagctatagaaagtacacctacattaactccttcaagggaaaaaatactaaaattaaatccggttttagcagaagacgatataccaatgagcaataaatatgctagaacaattacaaccaaacaagatagacaccctaattctggaataatactatataacaagaaagttttaacatcagctaatcaaaaatacagaaatttaacgccgagagaatgttttttattaatgggatttgatgaaaattcgtttgatttattaatggaaaataatattaaatttgcaaatgatcgcaagatactaactaatgcaaaattaataagattagctgggaatagtatagttgttccagtgctagaggcaatatttgaccaaatgaaagagataaagaatacaattttatcaaatggaaatttagtattaaaataaatatatgactaaaaacacctatcaaaatagataggtgtttttgtatattctacagtattaattataatgtagaatatagtaactagttgaaattcttgatatatctattttaaagatatactagtagtgtgtatttaaaaaatatagtagcggaggggtattgtgactgaatataaaacaaagcaacaggttcataatagagctaaagaagcggtaggtaagacgttgaaagaacttaacggtgggaacccaattacaggtactaaaagttcagctggggacgcctttgaagcatggtatggcaaacaaaaagataatgatagtaaacctgacatggaagatgcaggtgttgagttaaaagcgacacctattaaaaaattaaaaaatggacaatatagtgcaaaagagagattagttttaaatattattaattatgagaaagtggcagaagaaaattttgaagaaagtagctttttaaataaaaatggcactattgaacttgcattttatgaatatataaaagaagcaaaaaaagatgattggctgattaaagaggcagttttatatgagatgaaacataacccaattgattatgaaattattaaacaagattggcatataatacatcaatatatagcgaacgggaaagcgcatgagttaagtgaaggattaacaagttacttatctccttgtactaagggtgcaacatcgaaatctgttagaaaccaaccatattcagatattaaagcaaagcaaagggcattttcgcttaaatcaggatatatgacttcaatattaagaaaatatgtattaggtgatgaaacgatagattctatagtcaaagataagtttgaaattgaagaaaaatcaatagaagaaatagttatagataagttccaaccatatattgggtggacaattgatgagttatgtaatcactttgatattaaacaaggagcttacaatttaaattatagaattgcttctgcaatattaaatttacaaggtaaaattactaagaataaaccttttcctcaagtagaagaatttgagaaatcttcaattgttgtaaaaacagtaaaattcaatgaaaaaaatcaaaataaagaaagtatgtcatttggagcgtttaagtttgatgaattatcaaaagaagcttgggatgatgaagaagggtttccaagtgcacaatggcacaactttttattagaaacgagatttttattttttgttgtaaaaacagaaaacgaaattgatgtttttaaaggtattaaattttttactatgccagaagaagatgtggaaggcccagtaaaagaagtgtgggaagataccgtaaataaaatcaataagggtattactttggaagctgtacctgataaaagtacaaaagacggatggagaattaataataattttatcagtaagtcggataatttaatatgtcatgtaaggccgcatgagcaacaaagagactatagtgaaaatggtcgatatgctgataaattaccacatctagcgcattggattaacaagccggacactgaagattattcaaatcaatggatgactaaacaatcattttggataaataatgattatattaaaaagcaggttgaggaattactttaggcattctatgttataatttagaatgtttaattatgataaaaaactagaacgatcgttcggttttgtgttataatagttaacaagtaattttaggaggtcgcctaatggatgatattaaagttgtagagttatttgctggagtcggcggttttcgtttaggtttagagcaaacaaaaaatcggatttttgatgtcaattgggcaaatcagtgggaaccttcacgtaaagtacaacatgcttttgattgttataataagagatttaaaactggagaacacattaataaaaatatagaagagatatctaataatgaaatggctgaaactaaagctgatatgatagttggaggctttccttgtcaagattattcagttgcacggactttaagtggtgagcttggaatacaagggaaaaagggagtattattttggcaaataattagatttgttcaaaatacatatccaaaatatttattattagaaaatgtagatcgtttattgaaatcaccatctagtcaaagaggtagagattttgcagttatgttgtctacacttaatgagctaggatacaatgttgaatggagagttatcaatgcagcggactacggtaatgctcaaagacgtagaagggtatttattttgggtacaaacaagatttagatttatagtaaatgctatggaataaaggagaagctagaagatatcgtgtatagaaatggtatgttcgctcaagcatttccgattgaaaatgagccaaataaaaatagagttgctgaaacaataatttcaagcgatattgtagaagtatcagataattttaaatttcaattttataatagtggggttatgaggaatggtaaagtattgaccattgatacaatacctaaatatgaaaaacctttaacgttaaaagacgtacttgaagaaagtgttgatgagagttattcattaaattttgatcaaatagaaaaattccgttatttacgtggccctaaaaaaattaaaaggactacaaaagaaggacatgaatattacttctcagagggtggtatgtcagaaacagactctctagatttacctgcgagaacgatgttaacaagtgagtcttcagtaaatagaagtacacatttattaaatatagataatatatatcgtacacttactcctattgaagcagaaagattaaacggttttcctgataattggactgatacgatgccagatagaatgagatttttctgtatgggaaatgctttggtagtgccgattatcactagaattggaaaccaaatagaaaaaatagagcagatgactagcgattcatttagtcagttaaaattattttaaattttaattcagtagttattgatatgctactgaattttttgtatataaaagacgtgcaaagtgtgataattaatagttatgtatttagttttttatatttttaagaagataatgctgagattatgtaaaaatgaattatcccagattttatagctaataagtggtatgatatgtaccaaaaacaaaatgtatttgaatctgtttttcctgaataacacttttaaaatgttaatgaaaaggagaagggtatgtatattaaagatgtagcgcaaaagacgaatttagaaccacatacaatccgatattatgaacaagaggggctattatcttttattgaaagagatgaacatggttatcgagtctttaaagaaagtgatttaggttggtttgatttcataaattgcttgaaaataacgggtatgtctattaatgatttaagaaaaattattaaaatgaccgtgaatggagaaaaagattttgactctaggcgtaaaattttattaaatcataagaaagttttagaacagcaacaagaagcgttagacaaagcatttaataaagtagacgtaaaacttcaatgttttaatgatttagaaaaggaatatgaaaagcacagtcaaaactaattatttgctataaagtgcactttaacccttagtataaaaatataaatattaaattaaagggagcgtttcaaatggttgaaaataaaaaactcgtattgataacaggatcaagttcaggattaggttttgaattggcaaaattatttgcaaaagatggttatgatgttgcaatgtcaggctcaagtgatagaatttacgattctgcaaaagaaattgaaaaattaggtgttgaaacgtatccatttcaagccgatgcgtcaacttatgatggggtagaagatttttggcgttttgttgaaaataaaaatcgtactgttgatgcggcagttttaaatgttggtattagtattggcggagcatttttagaaaatgatttagatgaagagttaaaactgattgatattaatatttcaggtatggttcatatggctaaaagggtttcacagcatatggccaaaaataaatctggtgatattctaatcgtttcatcattatctgctacgttaccaacaccatatgagactgtttatggaccgtcaaaagtatttggatttatgtttgctgaagcgttaagagaagaattgaaagaaaaaaatattaatgtaacggctatgttacctggggcaacaaatacggattttcatcataatgcaggtatggatgcaacatattttggagatgaaaatcataaaaatgataaagtgcttgttgctgaacaaggctatgaagcgttaaaaaataaaatcgaccacgtggtatgtggtgatgaagctacaaaaaaagaggctgaagaaaatagaaaaacagctgaagatgttaaagcagctagacatgcagcaaaagcgaaaccacaataacattaatatacttttggcatctatttgaaacaaatatagtagggcgtatctttaataataaagggatacgccctatttttatcataaattaattcatacaccatgcctatctagaaatgcgacttatcccatcacgcgctctaaacgacatgccgcacaaatcatcattccccagtgcttcacacgcaatataaatcaaacaagtaaaatcgtggcgctattttatagctttcaagagttggttataaactgttttggcttgtgtctgatttttaataccgtatacgtgtgtacgtccatctttaaaaatggtcatcgtataatctccgtaatgagctaatttcacaaaatgattacttttcgttacgttgagtggtagatagtctacgtgttcaaagatttgagtgccaaaccgaaacaagaatgcatctccacaaagtgcttcgatagattgtttttgctgtgtatggagtagctcatagttatgacgtatacatgtaggacattggggatccttcaaattttctgcgttaaatgtgttaaattttaaattaaagcaatcgaaggtcattattttttgagaaaagccttcaccagcgacccatcgaatgagttctgagacttgtatgcttgttacttgagatacgacgggaggtaagacgccattaatagcgcaactttcaccggtcgttggtatggtttggagcatgcattttaagcaaggacctgtataatctatgccaaagactgtacctttactcccaacggcggcgccataaatccacgggatatgcagtttatggcaagcttcattaatgaggtatctgatttcaaaatgatccataccatctataacgatatcgggttgtgcctctgttaaaacagcttcaatattggaaggtgttagttcttgatttacatcggtaatggttacctcgctattgataagactgaggtgggtcttcaatgcttctactttaggcaccatacgggctgcgtcggactcatcgtangttgcttgtctgtgcaagttggatttatncacgatatccatatcaatgattgttaactgacccacacccatgcgcgctagcatttctgcgctatgactgcctaatgcaccggcgcccataatcatcacgtggagcttctgtagccgattctgtccttctttgccaaaatcgtgatagcgtatttgtcgactatagcgttcattcataggaatccaatgccttcttgtgggctagatgcttgagcagtgtatttaactggaatgcgaccagcttcataacttagtctacctgcatgaatgcctaatttcattgcttcagccatttttacagggtctttggcactagagatggctgtatttagcaacactgcatctgcacctaactccattgcatgacaggcgtctttaggtgacccgatgcctgcgtcaacaatgatcggtacgttggctcgttcaataatataacgtaaatttaatggattattgattccgcgccccgttccaattggagatgctaaaggcataatcgcgtgtacgcctaaatcctctaaacgtttggctaataccacgtcattagatacatatggacaaacggtatagccttcgtttaataatatttcacaagctttataggtttctaatggatctggcaacaatgtttcgtcatcaccaatcacttcaactttaatcatgtcacagacaccggcgtgattggcaattttagcaatatgcactgcttcatctgctgtttttgcgcctgccgtatttggaaaagtaatgaattttgataaatcaacttttgctaatgggttaggcaatgctttgtcgtataagttcatacgtctgactgcaaaggttaatacttcagtttcagacgtttcaatcgcttgtgtttgtatcgcttcgttgtcaaacttacctgtacctaataataatctcgcttttaattcaaagtcaccaattttaaacattttatccgcctcctacaaattctaatagttcaagacaatcttgatcattaatctttactgcttgaaaatctgcttgttttactaatttttcattatgctgaacaatgactctgtcggcatccaactctaattcttgtaaaatagcttggatactgactgcttgattaaaagtaaaataatcaccgtttataacgcatttcatgttttacagctcctttcaattgaaaagtcttcaaattcagtgggtctgcgtccactttcaatccattcgctcatttttaaaccgatcagtggtgataacagaatgccgttgcgatgatggccggtaacaacgaatagatgatggtctacttcatccataatgggttggccgtttgttgaagtcggtctgataccagaccattgatgaatcagtttactgtttgctaagtttggtacgtagtgttgcgcttgtttgcacaaccaatgttttccgggtttcgtcacgccgatagaataatcatcaacatagctcgtagcaccgattaaataacggtgattcttttttggaacgatatagcaaccatttgtcataaatagggtggtctgcaggtttaacgtggggtgttcgactaagagtacttcacctttgacacccgtgacaggattttgggaaaaatattgatttaataattgaccgctccaagcaccagctgcaacgacaaccttttcggcgcggtacgtgtctttttgcgtcatgactgtatagccgttattttgctttgtaattgcttgaacttcactatgatcaatcaattggatatggcgtttggctaaggaaagtaatagggctttggtatattgattcgcgttgacttgatgatctttaggtatcagcatcgcggttaaagtttgagattgaacgttattgtctgtaatggcttcaagggacttggaagataataattgtgtgttcgaatcgtgctggtgtagaaattggaattgctgttccacaatgggattatctgtctcattttttgccattttaactaggccgcttttcaaatattcaatatctagaccgacctcagacagcaaacgatctttaagggaatgaaacatggcttgagattgtcttgctaaatgaaataaactacaagattccgtaaattcattatgtgcacctaacatacctccagctgcgtaagaggcatacataccgcgaacattgcgatctataatggctatccgcaggcctttttgacttaattctcttgcaatcgacatacctattacaccggatccaataataatgacatcaaatttggtattcattccatcgctcccttaataattccatcgtttctctgttttttcgtctgaatagcgttatacctgcaatcccatcaaatcctttcggcaaatcattcaaggtttgttcattcacacccccaagtgctacggttggtatagagtactgtaatgctttatcaatttctgactttgttcgtggtggttgattaggcttagaatttgttctgaaaatatgactaaacaatataaaatctaaattgagtgcttgtgcttgtttgacactttcctcgtggtgtgtcgacatactgatttgaatatgagggtgtgactttttaaaatcctttattcgtgtgtcagcttctctaaaatggattgctgataaatggcattgttctaaaactgtaatatgactatgaataatgattttatttttcggaaaccctgcctgtattaagcgattcatccaatctatcagttgctgttgtgacataggggtacgtatcattaaataatcaataacggatgctatggttgtgtaatgttgaatatcgtctgaatctaaattttcaaattcagtaatagctataaacatataattcacctcattaaaaaaacgtcacttctccggctggaaaaatgacgttgaaataacgagtaatatacctaaacgccactttcctacgccagtacaaactggatcaggttcagggaattcctaagttactacttcggtctcagccttttacaaggcacttccagtggtttcttaaactatttaatttttaataatacgtttcactaattttctgaataattatctacaatctaacgtattctattcctttttgcaagtttcacttaaaaacaaatgtgtatattacgatattgaattaactggttgaacactctatggcgctcactccagaaaaatatttttagcgttaatcaacgtcagatatttcgagtaatttacttgtaatggcttgtgtttgctgataaacagctttatataattcaaaataagccatatattgttcgtgtcttttggcatcaggttcaaagctatgttcatattttataaaatgctttgtcatatgcgctacatccggataccatcctaaacctaagacagcgagcatggctgcgcccatacaaggtccttcttcatatttcaattttttaattttagcattaaagatatcggcttggagttgtaaccaaaagtcactttttgcgccaccaccaatggatatcacatgttcaatattgttacccatgtgacgtagatagttaatggattcatataaagaaaacgtaatgccttctatcacggaacgcgcgatatcactgctatgatgcgacgtttttagtcctataaaactccctcgaatacttgcgtcaccatgcggagtacgttccccggataagtatggtgtaaataatagaccatgactgcctaatgtggatgattcagcttgtgcaacaatttgttcatagcttaaatgcgggagcatatgattttttaaccatgtcaaactatcgccagctgcaagtgtgacgcccatgacgtacgacatatcgtttacgacgtgattaaaataatgcatattgtgtttatagtcgtattgcttgtcagattcactcgttaagataacgccagaagtaccaatgctacacagcgtttggttttcatcgaccactcctgaaccgagcgcaccgcatgcattatctccgccacctgcaaatactgcaacatcatgatttaggcctaattgtctagctatgtctttagtgacgtagcctacaaaggcatcagaagtcacgagctcaggataaatatggtcaacaccaaattgtcggccaatctctttagcccaacatttttgctgattatctaataacaatgtactagatgcatcggaatactccatatttaatttgcttgttaatttaaaacgcacgtagtctttaggcaataaaaacacgtttgttttaagccagtgctcaggttcgttttcctttatccacagtagtttagtaagtgtaaagccttctaagacgggattgtctaatacataatcgccaagttgtgctttaattaaattacattgtgacgttgatcttgtatcattccacaaaatcgcatcacggatggggtggttttcatcatccagaataaccaaactatgcatttgtcctgacaaagataagcccttcacttgataatgattgagtgcctcactgtgtactaactgttgtatgcaggagcatgtagcctcaaaccagtcatctggattttgctcactataaccgttggccacatgccttgtttgtagtggtgcatgaacactttgtaatacgtcgccatacctggttacagcaatgactttaacagcactcgtgccaatatctatacctaatacgatatcttgcatataacgactcctttgtttacatatttagggagtggggactgaaatcaaattgtttaatagagatttcgtagtgcttccctagtgcttccctagtgcttccctagtgcttccgtagtacttccgtagtacttccctggcgaggatgactgttataagagtttacctgagcaaaccctcatgtatcagtctcactagatttttatgtgaaatacataaatgcataagaaggactcattttcatgaaatgaaaaaggagtgctttaaagaagtgaggctttacattttcagtccagtcatctactgcctaattgaaaaaggttctgagacaatcgatggatgtcccagaatcttatttataacactatttaatttaaattaaaaatttgggggaattttattatagaaaaatgttgaatatatgggggctgatatagagtgagatttactaaggtaaattaaccgtatgacctgttataacaaacaaagtaaaggtgtgagttagtaaaaaacatggcttaaatcataattaagccacaagttagtcatcgataaaaaaagagttaagttattcaatgctgagtaacttaactctttttatttatacacaaatttagttcgctatttcttttttaatttgtttggttgcttgaacttgttgttgatgatttaaatagtcgtttatttcttgttgtgacgcttctggatgttgttttttatagttacttgctaactgttgcattgcttttttctgttgttgctgattcgcttgatttcctgtgctgttttgtttttgctgtgattgttgtaattgttttgcttgctgagcatctaaaacgacccacgtatctttaggtactgtcacaacggtcgtttttttgattaattcttgattgtcatgtccaaagctaaataatgatttataaacatctgatttccaaacccaaactgtttttttagtttgtgttgttgctttatcagtattttttacttcatatgtcgcttggtgtttaaccgattctgataaatgatctttatccatatttggtttaaaatgtgtctcggctttttgatcgtctgaatgatttttataaaccataatataattattactattcttgcccatctcgttagcgattaacatattgactggactgtctttagaaccagcgctatagatttcttttttatcagaagtgactacttttttctccattccccaatggtgtgtcatgttagctgtgataccaatgatcataagtaataaggctactgtggaaatataacctaatcgaatcccgcggccgccatgcgccgag

SEQ ID NO: 49 - DNA, 71455 bp, Staphylococcus saprophyticus
  misc_feature (23753)..(23753): n is a, c, g, or t
tatcggagaagtttgggggatttcagcacatccaaatggcaaatgtgaaatattaaacgaaccatatcgtgggcaaacactagatcaagtatgggatgaacatcgagaactatttggtgattttccgagccaagaatttccattaatgactaaaattgtagatgccagagaatctttatctgtacacgtacatccagatgatgcgtatgcatatgaaaatgagaatggacaatatggtaagtctgaatgttggtatattatagatgctgaagaagacgctgaaattatatatggattaaatacccaatcgaaagaaacagcaattgacaagattgatgaagcggattacgattcgttatttaataaagtgaaagttaaagcgggagaattctattttatacctgctagaacgattcattctattggcgcaggtgtacttgtttacgaaacgatgcaatcatctgatgtgacttatcgtgtgtttgactatgaccgtgcacaagattcaggcgataaacgcgaattaaatcaagttaaagcgaaagaagtaattgaaatcgcaaatgaaagtattaatataccaacagatactgaaatcattgaaaatcataaacgtacacaacttgtttctaatgacttttttacaattgtaaaatggaacatttcaggtacattaaattatatgaaaccaagagagtttgtattgatttctgtgctcaaaggtgaaggtcaagtcattattgatggtgaagtattcgatttagtacaaggacagaattttatattaacgtctgatgatttagatacaatatttgaaggtcagtatgaattgattgtaagttacttatagagatagaagtgggagtgcattaaaatgattaagtttttatatgtatcacttgtatgtggtcttttatctggtgcaggcatatttttaaagacggatatatttccttcgatggctgttccaatgatttttggtgtaataggaattattgcagcattgattacaataccggataaagaaataaatggtatgctcaaattcggtggtgtgttaattaatacgatgccaattctgggcgctttaacgttaacttaataatgtataaattgagtatctttgcgattgcgtgaatgatactttttttatgaattttataaaatatggagagacaatgtgtgattagcaataaagttcttaaacataagtttaatttttctttataacaccgtgtacatttcaatatttacagtttagataagctgaaatatgttaaaatagtatttaaattggaggtggcaagattggataaagcaagaggcctcattatgactttagtaatcgcaatggtcgctacaattatgggcagtaaattccctatcattgggagtgctatatttgcaatcataataggtattttaattaataatataataacaatccctaaaaaatatgatgctggtataaaattcagcagtaaaaaaatattacactatagtatagtcgtgttagggtttacattaagcttccaatctattggcaccatcggttggagatctttaccaattatttttgttacattgtttgcagcggcattaattgtttatgtattaatgaaactgtttaatattaatgaacatttaagtatattaatgggggtagggactccatatgtggtggttcagcaattgccgcaacgagtccggttataaaaagcaaagaaaagtgaagttgcatttgctatttcgacgattttcttatttaatctcatagcagtgttcatcttcccaccaattggtcatatcatgcatatgggacaagcgacttttggttattttggaggaacggcgattaacgacacgtcaagtgtcattgcagcaacttctaattacggtaaaactgcattggaaacaggggccgttgttaaattaacacgtacgttaatgattattccagtcgttttattttttacatatagaactattaaaaaagaaaaagagaagcaatcgcacacatccatagctaaaatcttcccatggtttattgtttggtttgtcatagcatcattgataagtacaattttcaatttttcaccatcagtgattcatatgtttcaacaattatcgttatttttaattacaatagcgatggctggtattggtttgaatgtggatttcaaacaatttagacaagcgggtatcaaacctatattacttggtttagtgacttggatcgttgttattattacaagtttaatcactatgaaattaatcaacttattgtaatgtttgttctataaggtgatttttcatataataggaaaaatagaatttttatatgagataaggagtatctaaatggcagaggaaacaagttatttttggttaaactgcggttataatcgctggaaccataatgaaccaatggttggacaaacaacattatttgaatcaggtgcacaatttaatccctctcaaggtttccgttcatttaaacaggccaaagttggtgaccaggtcatcttttatcaagtgcagatggacactggtttattaggatttggtgaaatcacaagtgtacaaacgggtgctcaaaataaaattcgcgttcattttgaattacaagaacaattaaagccgttaacagctgattatttaaaaagaagtgaacagttagaatttagaatgggtaatatgaaagaaacattatttaatcaaattactaaagaagagtatgaactaatcgttagcttaggcaaaggccaaactaaaatacctagatacttttttatatctgaggaacaagaatttgaaccagaatcatataacacgatatttacacatacgtataatggtataaaaagaaatggttatcatttttatacacagttagaaataggggaccaacttgttttttataataaaaaacgagagcaatcggtcattggcgttggtgaagtgagtaaacatatacatgaaaagccacctattcctggtagaactaatagtacggctattgaagtatattttgaaaaagaaattgaacctgtctcattaagtactttgaataagcatcctaaattaaaaaatctttactacttacaggaaaatgcaaaacaagcgattgcaagtatgtcacaaacgcaatttgaatctatacttgaaatgagtgcgaatgatggtttgaaaccacaatttgaagccgtgcaaagcgataatgtgatagataagccagcagaagatttgaaaccatttattctgcttgtagtagataaaggagaaggattaaaagcggcagaagacttattgcaaaaaacaaatgcgaatccagttattacttctgggcacccggatttcacagaagacatgctttatggaaaatatttaccaaatgagacgggcgctttatattatagagaaggttttataacgaatctcatgcctcgaaaagataaaagttatttagttatagataattttaaccgtatagatcctgatatttttcaaacatatatcaatgtgttggaaggctatgagatgacgttaccacgttataataaagatggtactatggttaaatggtctagaaaaaaagattcgttttatcattttaatccgaattggcatattgtcgctatcacgtatgacagtttaaatgaaattaaacaaaaatacacagaacagtttctaaaatatactagaattgttaaagtgaaccaagattaaaaagagtttagaataattgaacttatacgttatgatgaagcataagtaattatgaaagcatatgaaatgatcaatccttcaagaatggattggtcatttttttatgcaaagtatgacaatataaatgtctattaattatttaaattatagtggatacttttaaaacagaagcgtaaaaaagacataatgtttttaatcgacgagcactgataggaataggcagatataagcacttatgatttattttaaggaaattaggatataataaaagtaagtcccattatataatgataatggtagactaaatatatcattttaggagcgttgtatatgccaataatttattatgatggtaactgtgtttattgttataactatgcgatctggttaattcaacacggactttctacacgttatcaatttgccaaattacagggtgatgtagcacaaaatttattagaaaattatccagaagcgcaacaatacgatagtgtgattttacaagaaggtgaccagttgaaatataaatctgatgcaattacaaccttaatcacatcgttgactaactacaaatggttaggtatcttgttgcgtttcgtgccaaatataatcagagattttggttatcaattatttgctgataatagaaatcatatgtggaaaacccattggcatgaacctaatgattatgaaaaatcattttttattgactgattattttttactgaaaatacggaggaaacaaacatgggaaaaattattgtaattggtagtgcatcaatagatttagttgtaaaaactgatatattgcccgaagcaggagaaacagtaatgggcacttcattttttactaatcctggtggcaaaggcgcaaatcaagcggtagcggctgcacgcttaagtaatgaagtgtatatgataggtgcagtgggcgatgatgcatacggcaaacaaattttggaaaacttgaaagataatcatgttgataccacttacatggacatcattgacaatgagaagtcaggtacagcacacattacattatttgaagatgataatcgtattattgtcgttccggctgccaataactatattacaccagatattgttttgccaaagttggaaaactttggtgaagatgacattattttgctccaacatgaaattcttgaagcaacggttcaatcagttgtcacatatgcagcaaagcatggtatcaaagttattttaaatcctgcgccttatcgtgaattggataaagaagtaatcgaaaaagtaacatggataacgccgaacgaatcagaaagtgaattactatttgaccatcaagtagaacaagcacttaaagcatatccacgtaaacttattattacgcaaggcgcaaaaggcgcattgttttatagcgatacgcaacaactgattgaaggttataaaaaggaagtcatagatacaacaggagctggagatacttttaatggtgcactagcagttgcattaattgaaaataagtcattggaagatgctgtgaattttgctaatttggctggtagtttttcagtgacaggtttaggtgcacaaggcgcaatgccgtatagaaaagacttggaataagtagtgcgcaatttgttataataagtgtaggtcattaaatggacatctaaattaaaatgattctaatttagagcacgaatattctttacagattagaattattataatataataattattgtaatcaagaacggtgttgtcatttaatgataatattgaaatttaaaggagagattttacatggcaaaaagtaatgaagaagtagtaaaagtattaaatcaacaagtagcaaactggacagtcgcattcacaaaattacacaattttcattggtatgtaaaaggtcctaatttcttctcactacacacaaaattcgaagaattatatgacgaagcaagtcaatacattgacgatttagctgagcgtattttagctgctggtggtaatccagttgcaacattaaaagaaagtttagatctttcaattatcaaagaagcaggcaaaggttacaaagctgaagaaatggttgaagaactttcacaagacttcgataatgtatctaaacaattagaagaagcaattgaagttgcttcaaatgcagatgatgatgtgactgaagatatgttcatcggtatgcaaacaaatatagataaacataactggatgttaaaatcatatttaggtagataatacattcagtttaagataaagagaatagtgtctgggcatatagcttagacgtataaaagaggccctgtctatttaaatagacagggcctctttctttataaaaaatgttagctgagtattatgaattagcacactagctctatatgtacttatttacatatcaatctgaaacctaaagaaaatgttattcagcaatttctaatgctatttccatcatttgagtgaaagagttttggcgttcttcagcagttgtcgcttcatcacgtaagatatgatcgcttactgtaaatatgcctaaagcttttttatttgcataagtagcgtttaaatatagtgctgcagactccatttcaatacctaagacacccatgcgttgccattgttcattgaatgtagggtcggcattatagaacgtatcagaagataagatattgccaacatgtgtcgtagcaccgatatcatctgctttttgtttagcttttaatattaattcaaaatctgctaatggtgcaaaatgaccaggaatgttgtattgctccacataactagaattcgtagaagcaccttgtgcaataatcacatcatataagttaacgttttcttgtaaagcaccgcatgagccgatacggatgattgtgtctacatcaaagaaattgtatagttcatacgaatagataccaatacttggaacgcccatacctgatcccattacagatacttctttaccattatatgtaccagtataaccaaacatattacgtacttcgttaaattgttcaacgttttctaaatagttatccgcaatatattttgcacgaagtggatcccctggcattaatacggttttagctatttttttcccattaggttgaatatgaggtgttgcttttgtcataatcatcttctcctttaaattctttatcaaattaaagataacatttgtttattatttttgcgaatttttgtagtatagaggtaaagagagaatgtttataaacatatatgtttaattttactatataattatgagtgggttaaaacaccatatgctaataaacaaaataataggaggatttaatatgaattacgcaaaatatatagaccacacattacttaaaccggaatctacgagaaatcaaatagataaaattatcgaggaagcgaaagcgtttaattttaaatcgatttgtattaatccaacacatgtaaaatatgctgctgaacaacttaagggttcagatgtattagtatgtacagttataggttttccattaggagcatcaacaactgaaacaaaaatatttgaaacagaagatgctattaataaaggtgcatcagaagtagatatggtaattaatattggtgctttaaaagatggacgctttgaagacgttcaaaaagatatcgaaggtgtcgtaggtgcagcgaacggtaaaacagttaaagttattattgaaacatgcttattaactgatgaggaaaaagtcaaagcaagcgaattaagcaaggtagctggtgctgattttgttaaaacatcaacaggatttgctggtggtggtgctacacctgaagatgttaagttaatgaaagatacagtgggcgatgatttagaagtaaaagcttctggtggcgttagaaatcttgaagacttcaatcatatgcttgaagcaggtgccacacgtattggcgctagtgcaggcgttgaaattgtacaaggtttagaaagtgactcagattattaataaataactgaaatcttgtctgaatacagttatgtattgacttgaaaaataggggaggccaactcatatgagaatggtagaatattattgaaaaaaaacgtgatggtcaagcgctaacgaaacaagaaattgaatactttattgatggatatacaaatggagatattcctgactatcaagcttctagtttagcgatggcgatttattttcaagatatgaatgatgatgaacgagctgccttgacgatggcgatggttaattcaggtgatgtcattgatttatctaatattaatggggttaaagtggataagcactcaacgggtggtgttggtgatacgacgacactagtacttgcaccattagtggctgcggtaggtgtgccagtagcgaaaatgagtggtcgcggactaggccatactggtggtaccattgataaattagaatcagttgaaggtttccatgttgaaattagcgaagaacaatttgttaaattggttaatgaggcgaaagttgcagtcattggtcaaactgggaatttaacacccgctgataaaaaactatatggacttcgtgatgttaccggtacggtgaattcaattccactgattgcatcgtctataatgagtaaaaaaattgctgctggcgcggatgcaattgtattagatgttaaaaccggtaatggcgcatttatgaaaacgttagaagatgcagaagcgttagcgcatgccatggttcgtatcggtaataatgtaggtagaaatacaatggcaattatttcggatatgggccaaccacttggcaatgcaataggtaatgctttagaagttaaagaagcgattgaaacgttgcaaggtaatggaccagaagacttaacagagttagttatgacgctaggttcacagatggtagtcgtcggtggaaaacgctcaaaatcttgatgaagcacgtaaaatgttagaacaagcaatccaagatggtcagcgttagaaagtttcagaacatttttagaaaccaagatggcgatggttctgttgtagacgatgtatcaaaattaccacaagccaaatatcaaattgaactacccgcacaaagtgaaggcattgtaactgaaattattgcaaatgaagtcggtgtagcttctatgatgttaggtgcaggcagacaaactaaagaagacgaaatagatttaagtgtgggtctcgtattgcataaaaaggttggagatagcgtcaacaaaggagaggctttgttaacaatccacagcaatcaagaacaaattgataacgtaaaagataaactattgcaaagtattacgattagtgacactggtaatgaaccaacattgattcataaaataattactgaataggagaggaatattatgactacaccatttaaacgagttcatttaattgtcatggactctgttggtattggagaaggacctgatgcaaaagcttttgatgatgaaggcagtcacactttaaagcatacgctcgaaggatttgaacagtcattacctaacttacaaaaattaggtttaggtaatattgaacctcttccggttattgataaagaagcggaaccacaagctttttacacaaaaatgagtgaagcttcagtcggcaaagataccatgactggccattgggagattatggggctaaatatcatgcaaccatttaaggtctatccagaaggctttccagaagaactggttaatgaaatcgaaacgttaacaggacgtaaagttgtagccaatcgtcctgcatccggtacgcaaatcatagatgaatggggcgaacatcagatgaagacgggtgatctaattgtctatacttctgcagacccagtacttcaaattgcagctcatgaagatattattcccttagaggaactatatgacatctgtgaaaaagtaagagaattaaccaaggatcctaaatatttaataggcagaatcattgctagaccttatattggagagccaggttcatttaaacgaacttctaatagacatgactatgcattaaaaccatttggtagaacagtaatgaatgaattaaaagataatggttatgatgtcattgcccttggtaaaattaatgatatatttgacggtgaaggtgtgactgaatcgatacgtaccaaagataacatggatggtattgataaattaattgaaactgtgcaacgtgactttaatgggttaagctttttaaatcttgttgatttcgatgccctttatggccatcgtcgtgataaacctggatatgcacaagcgattaaagattttgatgaacgtttacctgaacttatgaatcacttacaagaagaagatttagttattattacagcagaccatggtaatgatccaactgcagatggtacggatcatactagagaatacattcctgtacttatgtttagtcctaaaatgactgactatcatgagctaacgatagacagcacatttagttctttaggtgcaacgattgctgataattttggtgtgaaattacctgaatttggcaaaagctatttgaaagaaatgggtgttgaaaagtaatgcgtattttaagaatgctatttggaattgtctttagtgttgcaggggtactccattttaaagatgaagaacaatttagatgtattgtaccagcgtacttaccatttcgaaaagcagctgtgttaatcacaggcgttatggaaatcgtgtttggtgtcatattattaatgaaacaacctactaagggtcaaaaaaatgcactcatagcgtttttatgggcggtcttaccagcgaatatttatatggcgcgcaaacaaattccaattgctggtcaacaacttccgaaatgggctttatacggacgtattccattgcaatttgtgatgatgaaattaatcaaaaaattataacttactaaactaaaataagagagcacatgcgtttgaaatgacgctgtgctctcttattttatatatttataaaatgctaactcacattataaattattgtgcttcaccatagatatcatgccattcagcttttttgtctaagaatgtttgggctatttctttggcgccttctaatgaatggctagcagcccaaccacattgaacttcattacatgctggcacttctgtagcatttaatacatctttaattgttgcttcgataatatttaacacatcttcatagtcatcatgattgataaatgaaacgtaaaatcctgtttggcaacccattggactaatatcaacgactttatctgaatgatttctaatattttctgccattaaatgttctaatgaatgtaatccaggcatatccatatgctctttgtttggttgtttaaagcggatatcatatttatgaattacatcaccgttagcgccttccattttccctgctaatctcacaaaaggtgctacaacgattgtatgatctaaattaaaactttctacgttcatttttggcatggtgtatcctcctcatatataacttaaattaattgtaacaagttaaaagaggatttacaatttttgaaatgtggtataaagacgtatgaaagttatttttataaatttcagaaaatgaatgacagaatttaataaacccgatagaataagtaataattaaatcatgttttgtgcattatgaatcatatgttgtgttatttaataaattacttattgcatttgatttattttataaattgagtataaacataatgccaagtaatttaggaggcagtgttgaattatggaaaataaacaaattgtattggactatatagaaaatgaaaagtataaatatttagaaatgagccatcaaatccatcaaagacctgaattaggtaatgaggagatatttgcatctagaacgttaacggaaacgttaacgcaacatggttttgaagtcgaaacaaatatagcaggacatgcgactggctttatagcaagttatgattcaggacaaacgggaccaactataggttacttggccgaatatgatgcattgccagggttaggtcacgcgtgtggtcataatattattggtaccgctagtacatttgcgggtatagccttaaagcaagtcattgataaagtcggcggaaaagtaattgtattaggctgtcctgcagaagaaggtggagaaaacggtagtgctaaagcgacttatgttaaagaaggtattattgatgatttagatatcgccttaatggtgcatcctggtaatgaaacatacagaacaatcaatactttggctgtagatgtactagatgttaaattttttggtaaaagtgcgcatgcatctgaaaatgcagatgaagcgaaaaatgcacttgatgcaatgatttcatattttaatggggttgcgcaattacgtcagcatataaaaagtagtcaacgtgtccatggagttatattggatggtggacaagcagcgaatattatacctgattttacacatgcgagattctatactagagcaacaagtcgccatgagttagacattttaactgaacgagttggtcaaatagctaaaggtgcggcattgcaaactggatgtgattatgaatttggacctatacaaaatggcgtgaacgagtttataaaatcttcaaaactagatgatttatttgctaaatatgcaacagaaatgggtgaagctgtcattgatgatgattttggttatggctctactgacacgggaaatgtgagtcatgttgtaccaacgatacatccacatattaaaattggatcacgtaatttagtaggtcatacgcatagatttagagaggctgcagcaagtacccatggggaccaagcgttaattagaggtgctaagattctctcgcttatgggattagaattattaacgaatcaagcgttgtttgatgagattattgaacaacatcaatttataaaggggcataaaaaatgactaaagaacgctctcatagacccaaattaacacttagtgacctttacgattctagcgttgtctatacttctagaccgtcttatatttcaaatccatggctggaacctgaagaacaccaatcgaattttttaacaggtagagagctgataatagctaatcatatgccagtaatcgttcatgaagcgagcgtcactgataaattaaagcagttatttgaagcggtagggaaaacaatgcctacaaatatcattcaattcaacgatcaacaaagttatgaacaaactttaaaagtgttagcgcaagaagagaataagaaaatttattttcaatatattcatggtgaagatatattaactaaagcgcattatgcactagataaagatatctttgttgcattaaataataaagcaagaattcctgaatggacgaacaatcaattccttccccgtcgagaagttgtaaacattgaagattttgaggcggcggtgtctgaatggtcgttcccatttgtattaaaacctggggatgacttaccaactgctggcgggtatggtgtaatgatttgttattcagaagaagatttaacaaaagcaaaaacacgaattgctcaagctcaatcagaaacagacacaatgattatagagcaaaagatagaagcgattgctaattattgtgtacaatttgcatattctgaaaatggaggcatacgatatataggtacttcagctcaactcacagatgcttacggctattatagtggaaatgaaaatgcgccggatgtacctaaacacgtgatagaagctggtagagaaatcatggaaattggggtatctaaaggttactttggcgtagcgggctttgacttgttattagacgacaaaaatgatgtatatgcgattgatttgaattttagacaaaatggttcgacaagtatgttgttgttagagcctttacttcaacaaggctatcataaattttatagttatatttcgcctggtgataacgaacaattttttgcgacaattttgaaatatgtgcgactgggcgtattatttccactttcttattatgatggtgaatggtttgaaaatgatacggtgcaatctagatttggttgtatatggcatgctgaaaacaaagctacgattgatacattggagcaacaatttctaaaagagattcaagaaaaataaaatgtggaattaaaattagtggttctactcagtagataataatttaaaagctaaaaatgtaaagtgtctgggacataaataggtgtctcagattttttaattggacaatagatgtgaactactaccagcgatccaaagtactattgatatattttatgcgaatgcgtagtggttatgtatacgattagaatattagccaaggaagagaatgacttttattctttaatttttattgaaaaatttgattcctgttaatactttctaaatttataaggaacattcgttgattgactagaaacatacagtcatttatattttaaatataagtaattattataaatgaattgaaggtgaaaatatgtcttacaaagaaagttcattttttcaagatattttaataaatgaagttttttatgtcgcaactaaatcaaagcatttgattagacaagaaatatctgaacaaaatgtagtatgtgcttggacagataaagcaacagcagaaagttatttaaataaagagcaaattgaatatgacaaagtaaaaacggttgatattgatcgttttgtaacttatgaaattgacgatatttttgatgaagatgatgaggtattgatgaacccaacttcacataaagatggtgaacgcgttcgtatcgttgcagcttcaaatgaattgatgtctgatttggatagtattagattgaaagaatttgttaaagatgttgctaaagaagatgctgtgtttggattaactaataagaatgaaaaacaatttatcatgatcagtgatgaagcacaccaaaaaccacatattatgcctgtatggagtattaaaaacagagctgaaaaggtgagaaatcaagattttgaagaatgtgaaattattgagattgaaggggaagtatttgctgaatggttagatacgttacgtgatgatgaccatgcagttgcaatagacttgaagtcaggcgtagtcggaacagttgtgcctgctcaaaaagtaattgaccagttaacattttaattaaaggttatcaacaatatagctgtttatgagttatgtatttataatatttataatttagagcacaaattttatcgtatcgaaatagttatagatttgtttggagtaataactagttgaaataaagagattgagtcataaatagataatgtcaaaaagtctggaacataattaggcgtctaggctttttgtcaatttaaacaattggtgtaaagtccaactgcttattttaaatagttacatgattagtatctgtattattcaatttcatatttataaataaaacagtaatttctagtgttttaaactagaaattacagttttttgtttatacccattcagtatgattgtaaaaatcctataaaatcatttttcatttagataactcatataatgtcctgtttttaatatgtcatattgtggcagataaacgtgcttaatgagcagtctatacattatataatttaatgaatataagcattataaatgtatagaacctagagcaccagaaaatgcaccatgctcaatataataaggttcacacccacgtaaaacagtatagtctttgacgacatcctttaataaatcgttattgtggaaggaagaaccgatataggcaacattttttgtattatgttctcttgcgacagtaattgacattgtcgtaatgacttcaccgacgactgcaattacagaagccaatttatctgcatctgtaaatgattcatctaaatgatgtagcacattaccaaagttagctgcagttaaatcgccagaaataggaggctcactatctttatatatatgttttacctttaaatctataatatcacggttaccattttgagctgtatcagttaactgtttatagttactgatacctgtgagtaggtatccaaggccttgtatcataccgccaccggtgcctattccgcctacacgcttttgcgctttgccatttgaaaaatgaagtgaagtaccagtaccaacattagtgaaaatataatcatctaagaaatgaccttgttcttctaatagaatttctagccctttagctgcagcatcaaattcaacaaatacacgagattcacaattgagttgttcattaatcatggcagcttgcccacccgtcagattaatgttgttacaatcttgttgatttaaccattgaatgacttcctcaatttcagtagttaatcttgtgctgtatgttcgttcaccgtttttttcttgaacaattttaatgagcgtgccaccagcatcgacacctatcttcatctgtattccccctaataaaaatttccattataacttatagtataataaaatgaaggaaaatcaaatatggatttaataggattgatagaatagttcacaattaaggctgttaattaattaggtatgtttctaaattatatgtaaatttataggttgatttgattcagaagtggtatgaataaataacgactacgtttttaataggggattaaaacatgtttataaaggaaaattttgaaaatattacggtacaagtttatgaagaaaaatatagacaatctttatatgatttcaaattaagtgaaagacagcaaatttattcatcattacctaaagatgtattggatgatgcgatcaatgatgaagatagaattccaaatattgcactaaatgatgaaagtgaagttgttggcttctttgtactgcatcagtattatcaacatgaaggatatgacacgccaaatcaagttatatatgtgagatccttatcagtcaatgaagattttcaaggttatggctatggtacgaaaatgatgatgtatctgcctaggtatgtacagacactttttccaaattttaaccatttatatttagtggtcgacgctgaaaataaaggcgcttggaatgtttatgaacgtgcgggctttatgcatgcagctacaaaagaagaaggacctattggaaaagaaaggttatattaccttgatctagattctaaacatgtctcttctttaaaattaaaaccgaacacagaagaacaaccattcaatattcatatcattgatttaattaaagatgataataaagtgggatttattgctattgaaagacatgaagatcgaatgaatatctcttcggttgaagttaacaaagaagaacggcaccatggtattgctgaaagcgcattgagacaattatctacatatgtacgtaaacattttgataatgtaaagttattgacaatcactttgtatggtgaaaataatgaattaaaaccgttatgtataaacagtaattttgttgaaatagatgccgcagatgattatattgtctttgaaaaatatataaattactaaatgcgattgcgaaatcaggaattgtcatttataatttacatttgttattattacttatgttaaacttagtactgatttggataaacgcctttgaaaggaagaataaataatgagaattcaagattacacaaaagaaatggttgatgagaaatcatttatcgatatggcatatacgttattaaatgaaaaaaatgacacaatgaacttatatgatattattgatgaatttaaagcacttggacattatgaagacgacgaaatcgaaaatagaattgttcaattctatacagatttaaacacagatggtcgttttttaaatgttggtgaaaatatttggggattacgtgattggtattcagttgcagatattgaagaaaaaattgcgcctacgattcaaaaatttgatattctggacgacgatgatgaagaagataaaaacttaaaattacttggtgaagatgaggctgatgatgatgatgatattccagcagttacagatgaccaagagactttgaatgatccagaagatccagaagatgacgatgttgatgaagatcttaatgaaacagatatcgttatcgatgaagatgatgaagatttagacgaagaagatgaagaagaagaagaatttgaagaagaagaagaatttgaagacgaagaagaaacagaagaataattctttgagatttaattgacttttttcgtgaacatgataaaattttattcgggctcctttaattaggacgacgtgtataaatattatacgctcccccttacaaccatgtgagagggagcgatttttttgttttaaataatatatcagttttatagtattttatattttgaaagtacttgttacgacaattaatacatataatgatgaagcatttaaatatgtaaatgttgtatcacaaaatttagcaactaatttggaaatttgatacgaatcaaaacgtattgtaagaaaatacggttttaatcataggaggcagaacatgacaaaattcatttttgtaactggtggagttgtttcttcattgggtaaaggtatcacggcagcatctttaggaagattattaaaagatagaggattaaaagtcacgattcaaaaatttgatccatacttaaatgttgacccaggcacaatgagtccatatcaacatggtgaagtttttgtgacagacgatggtgctgaaactgacttagacttaggacattatgagagatttattgatataaatttaaataaatattcaaatgtaacggctgggaaagtttattctcatgtcttaaaaaaagagcgtcgtggtgattatttaggtggtacagttcaagttatcccgcacattacgaatgaaataaaagagcgtttattattagctggggaaagtacaaatgcagatgtagttattactgaaattggtggtacaacaggggatatagagtcattgccatttattgaagcaattagacaaatccgtagtgatttaggacgcgaaaatgtaatgtatgttcactgtactttgttaccatatatcaaagctgctggagaaatgaagacaaaaccaacacaacatagtgtgaaagaattaagaggtcttggtatccaaccagatttaattgttgttagaacagaatatgaacttactcaagatttaaaagataaaattgcgctattctgtgatattgataaagcaagcgttatagaatgtcgtgatgctgattcattatatgagatacctttacaattaagtaaacaagatatggacgatattgtgattaagcgtttagaattaaatccaaaatacgaaacgcaattagatgagtggcaatatttattagatacggttaacagtttagatggcaagataacaattggtttagtaggtaaatatgtaagcttacaagatgcatatttgtcagttgtcgagtcattaaaacatgctggctatccattcaaaaaagatatcgaagtgaaatggattgattcaagtgaagttaccgatgaaaacgttgctgaaatattagcagaagttgatggtatattagtacctggtggatttggattccgtgcaagtgaaggtaagatatcagctattaaatatgcacgtgaaaataatgtgccatatttcggtatttgtttaggtatgcaattagcaactgttgagtttgctcgaaatgtcattggactagatgacgcgcattcagcagaattagatcctaatacaccacatcctataatcgacttattaccagaacagaaagatatcgaagatttaggcggtacactacgcttaggtttatacccttgtcatatcaaagaaggtacattagcagattcaatttataatgaaactgaaattgaagaaagacaccgtcatcgttatgaatttaataatgaatatagagaacaactcgaagcaaacggaatggtgttttctggaacaagtccagatggtcgtttagtagaaatggtagaaattccaagcaatgactttttcgttgcatgtcaattccatccagaatttttatcaagacctaatcgccctcaaccgattttcaaagcatttatagaagcatcattgaaccatcagcaatctaaataatatgttaagacacacatactcgaactattacgtcgagatgtgtgtctttttttatttagtgcttcgttcaaatgtatgtatataaaaatggggtataaacgattattaaaatttgaaatttaggcgatttttatacatctagaataaaaatataaaataaaaacgcttacaaatatattgaagaatgcaaaaggtatatgactttgatataattagattgtaaaaatatgtgcttaaagcaccaaggaggaactttcatgcctttagtttcaatgaaagaaatgttaatagatgcaaaagaaaatggttacgcagtaggtcaatataaccttaataacttagaattcactcaagcaattttagaagcttctcaagaagagaacgctcctgtaattttaggtgtatctgaaggtgctgctcgttacatgggtggtttctatacagttgttaaaatggttgaaggtttaatgcatgacaaagaaattactgtaccagttgcaattcacttagaccacggttcaagctttgaaaaatgtaaagaagcaattgacgctggatttacatcagtaatgattgatgcttcacatggttcattcgaagacaatgttgaaatcacttcaaaagttgtagaatatgctcatgaacatggtgtttcagttgaagcagaattaggtactgttggtggacaagaagatgatgtagttgctgacggcgtaatctatgcagatcctaaagaatgtcaagaacttgttgaaaaaacaggtatcgatacattagcgccagcattaggttcagtacacggaccttataaaggtgaaccaaaattaggatttaaagaaatggaagaaattggtgcttctacaggattaccattagtattacacggtggtacagggatcccaacgaaagatatccaaaaagcaattccttttggtactgctaaaatcaatgtaaatacagaaaaccaaattgcttcagctaaagctgttcgtgaagctttagacaatgataaagaaatgtatgatcctcgtaaatatttaggacctgcacgtgaagcgattaaagctactgttattggtaaaattaaagagtttggtacatctaaccaagcaaaataagttaacgaataacttttgatactttatatatgttgtatcgatttatgagggcgagacgtcgaaatcaaattcatttttttgatttctgcttcgctctcttttttatgttataatttgttaggtttgtgtaaaaaagcaatcaggaaagcacggataacataaaattttaataataaatccttataattatgatttgaattgataaataatgggaaattgaaacaatagtaaaaaaattatatacaagagaaaacactttattttatatgaaataaattttaataaactgatgtgctttgcaaactgtaataaattaatttataatgcaaatgatgttatggaagagaaatattgattgaaaggcaaaggagaacatacgaatggctcaagaagtgattaaaattagaggtggtcaaacactaaaaggtgaagtgaacaaccacggtgctaaaaatagtgcagtagcaattattccagccgcaattttggctgaagacaaagtaacaattgaaggccttccagaaatctctgatgtagaaactttagtaagtttacttggagatttaaatattaagactgaattagatggtatgacattaaatgttgatccaaatgaaattgaaaatgcaccattacctaataataaagtagaatcgttacgtgcttcatattatatgatgggcgctatgttaggtaggtttaaaaaatgtgtgattggattaccaggtggttgtcctttaggaccgagacccattgatcaacacattaaaggtttcaaagctttaggtgctaaaattgatgaatcaagttctacatcaatgaagatagaggctgacaaattaacaggtgcgaatatctttttagatattgtaagtgttggtgcaacaatcaatattatgcttgcagcagttcgtgctgaaggtcaaactgtcattgagaatgctgcaaaagagccagaagtagttgacgtagctaatttcttaacaagcttaggtgcagatatcaaaggcgctggcacaagtacgattaagattaatggcgtagaacatttacacggttcacatcatcaggtcattccagatagaattgaagctggtacatatatgtgtattgccgcagcatgtggtgaagatataacaattaataatattattccaacgcatgtagaaccattaacagtgaaattaaaagagcttggtgttgatattcaagttggtgatgatagcgccgtaatccaacgtagtacaccatatgctagtgttgatattaaaacacttgtatatcctggatttgctaccgatcttcaacaacctattaccccattattgtttatggctgatggtgtatcatttgttaccgaaacgatttatccagcacgttttagacatgtagatgaattgaaaaacatgggtgcagatatttcggcagataatggtacagcaacaattaagccatctaaacttactggcgcagaagtttatgctagtgatttacgtgcaggtgcttgccttattgtagctggtttattagctgaaggtgttacaacaatttataatgtgaagcatatttatcgtggttatactaatatcgttagtactttaaaatctttaggtgcagacatttggactgaagaagtatagaaaatgtggtataataaatatacttagtaaccaaagtgtacttagtttaaatgataatagaataaatcgatattgaggtgatgaccatgaaggtttgcccttatctagaagaaacctttaaaatagtaggtagaagttggaatggtcttattattaattatttatctagatgtacggaaaagtctgcacacttttcagatatgaaacgtgatttaaagacaattacaccacgtgcacttagcataaagttaacggatcttagtgaatggggactagttgaaaagaaagtggtttctaccagtccaatgaatattctttaccaactgacagataaaggtgatgctttagcagcagcattagtgccaatggaaaaatgggctcaagattatattgaactcgaaaataaatagtaattaaattctaaagtaaaagcgaaattcaaaatattactaaaagagaatggagcacacagtcttaattaggtatttctaaagacaatcaattctattagttgtgattggaaagtagcgtattaaagtggaagtataatttaatcattttcgattgctctgaatttttaaagagaccaagacataaatcgatgtcttggtctcattttgtatatgaattggagtgtacatgtagttattcactgaataacaaaatggcgctgaaatttaatgggttaaaaaaattgtgtaaaatgaatggaaaacgctttataacaacgtttgctacgatttggcgtgagcacttatgtttaaaaaaatgaaatctcggttaaaatggtattatcaacaaaagttaaggagtgaattattgatgagaaatttcactaaacaatatatcaacggagaatgggttgaaagtacaagtggagaaacacttgaagtaattaatcctgcaacagaagaagttgctggtacgattgctaaaggtaataaagaagacgtggaaaaagctgtagaagcagcagataacgtatatttagaattcagacacacttcagttaaagaaagacaagatttattagatcaaatagtacaagaatataaaaatagaaaagaagacttaattcaagcaattacagacgaattaggtgcacctctatctgtagcggaaaatgtacactatcaaatgggcttagatcatttngaagcagcacgtgatgcattaaatgatttccaatttgaagaacgtcgaggcgatgatttagttgtcaaagaagcaatcggtgtttcaggacttattacaccatggaacttcccaacaaatcaaacgtcattgaaattagctgctgcttttgctgctggtagtccggtagtatttaaaccttcagaagaaacaccatttgcagctattatattagcagaaatttttgataaagtgggtgtacctaaaggtgtatttaacttagtcaatggtgatggacaaggtgtaggtaatccattaagtgaacatccaaaagtaagaatgatgtcatttactggttctggcccaacaggttcaagtattatgaaaaaagctgcagaagatttcaaaaaagtatcacttgaactaggtggtaaatcaccttatattattttagatgatgctgatatcgatggtgcagcaagtgcagctgctaataaagtagtgttcaacacagggcaagtttgtactgcaggtacaagaacaatcgttccagcaagtataaaagaagactttttaacagctgtaaaagaaaaattcagtcaagtaaaagtaggtaaccctagagaagaaggtacacaagttggaccaattataagcaaaaaacaatttgaccaagtacaagcctatattgacaaaggtattgaagaaggtgccgaattattatatggtggccctggtaaacctgaaggattagacaaaggttactttgcaagaccaactatttttaataatgtagataacagcatgacaattgcccaagaagaaatatttggaccagtaatgtctgtgatcacatataatgatttagatgaagcaatcaaaattgcaaatgatacaaaatatggtttagctggttacgtttatggtagtgataaagatacacttcataaagtagcacgttcaattgaagcaggtacagttgaaattaacgaagctggacgtaaacctgatttaccattcggtggttataaacaatctggtttaggccgtgaatggggcgactacggaatcgaagaattcttagaagttaaatcaattgcaggttactacaattaataagttaatttaataggtaatgtgaatctatatgagagtagaacaatgaaatctttttaagagaaattagatttctgttctactctctttttataatttatatatcgaaatacattttgtaattaaataggaaatttgctatagttataaaagtagtagcgtagttactatgttatttaaaaaacttatttatgaaatgggtgcaagataatgcctgaaaaagtacgaacatcacctcagtatgaatcgttccacgagttatacaaaaattacactacaaaagatctcactcaaaaagcaaaatctcttaagttaacaaactatagtaaattgaataaaaaagaacttgttctcgcgattatggaagcgcaaatggacaaagatggtaactattctatggaaggcattctagatgatatccaacaagatgcttatggctttttacgaacagttaattattctaagggagaaaaagatatctatatctcagctagtcaaatttgtcgttttgaaattaaccgaggagataaagtgactggtaaggttagaaagccaaaggataatgaaaagtattatggtttattacaggtggactttgttaatgatgagaatgcagaagaagtaaaaaaacgtcctcatttccaggcgttaacgccgttatatccagaagaaagaattgtgttagaaactacaaagcagaatttttcaactcgaatcatggatttaatcacgccaattggattaggacaacgtggacttatcgttgcaccgcctaaagcagggaaaacctctttattaaaagaaattgcaaatgcaattgcaaagaataaacctgatgcagaattatttgtattattagtaggagaacgaccagaagaggttactgatatagaaagatctgtagaaactgcagaagtagttcattctacatttgatgagccacctcaacaccatgtcaaagttgcagaattattattagaacgtgcgaaacgcttagttgaaattggtaaggatgtcattatactaatggattctataacaagattggcacgtgcttataaccttgttattccgccaagtggtcgtacgttatctggtgggttagatccagcatctttacacaaaccaaaagcattctttggtgcagcaagaaatattgaagcgggtggcagtatgactatattagctacagctttagttgaaactggttcgcgtatggatgacatgatttacgaagaatttaaaggtactggaaacatggagttacatttagatcgtaaattagcagaacgtcgagtatttccagcaattgatattggacgcagttcaacacgtaaagaagaattgctcattgatcccaaagaactggattcattatggcaattacgcaatatgtttacagattcaacggactttacagaaagatttgttcgtaaactcaaacgaacagacaataaccaagaattctttgaacagttacaaaaagctgctaaagaaagcacaaaaacgggtaaaccaatcatttaattactaaatgattcatagatataataccaatatgagatttagggttgcgttttatatttatagacattataattatcaagtattgggtaaaaaactcacaaaaaactctgttccagatggttcagggcaaaggagctgaaaataatgagacaaaatattcatcctgaatatcacaatgttatctttttagatactactacagattttaaattcttaagtggttcaactaaaacatcatcagagacaatggaatgggaagatggtaatgaatacccagttattcgtttagacatttcatctgattcacatccattctacacaggacgtcaaaaattcgctgcggcggatggtcgtgtggaacgtttcaacaaaaaattcggattcaaatcaagcaacgaataattgttggtataaggcattctcattttatgagaatgcctttttatgttaaaaagcacttcctaatcacaaatagatatcataaacaatgttgaaattcctttattttatgagtaacgatactggctgcaagtataccattaaatttaagtttgtatacaatgttgaaacaaaatggatcagttttgttagtaggcagttcaatgagaatttaacgatagttctatttatatatcccaaattgttacataaaattaacgcagtaacttgaaaatatatcctattttgtagtggaaaatatgatataatgaatcgattatgttttgaaaaaaggtggaacgcataatgtatgaaacttatcattccgggtggattgaatgtattactggaagtatgtttagtggcaaatctgaagagcttattcgtcgattaagacgagggctttatgctaaacaaaaagtagttgtatttaaaccagctatagatgaccgctatcataaagataagattgtttctcacaatggcaatgctatagaagcaattaatatttcgacagcagctgagatattaaagcacgatttatcagaagtagatgtaattggaatagacgaagtgcaattttttgaaaatggtattgtacatatagctgaacagttagctgaaaaaggacatagagtcattactgctggtctagatatggactttagagcacaacctttcgagccaatgccacaattgatggctgtgagtgaggatgtaactaaacttcaagcagtttgtgcggtttgcggtgcatcgtcaagtcgtacgcaaagattaattgatggtaacccagcaaaaatcgacgacccagtcattttagttggtgctaatgaaagctatgaacccagatgcagagcgcatcatatagtagcgcctagcaatactgagaaggaggaaatgtagtgtttgatcaattagacatagtagaagaaagatatgaacaattaaatgaaatgttaagtgatcctgatgtcgtaaataatccagataatttacgtaaatattctaaagagcaggcagaattacaaaaaacagtggacgtttatcgcgattataaacaaacaaaagaagatatttctgaagtagaagaaatgttacgtgatacaaaagataatgatgaaattgaaatgttgaaagaggaacatcaaacacttcaaaataaagtacctaagttagaagaagaacttaagttcttattgatccctaaagatcctaatgatgacaaagacgttattgtagaaattcgtgcagcagcaggtggagatgaggcggcaatttttgctggtgacctatttagaatgtattccaaatacgctgaaacgttaaattataagacagatattgtagaagttaccgaaagtgatcatggtggttataaagaaataagtttttctgtttctggtaatggtgcttttagtaaattaaaatatgagaatggtgcacaccgtgtacagcgtgtacctgaaactgaatcaggcggacgtatccatacatcaacagctacagttgcagtacttcctgaggtagaagatgttgaaatagaagttcgcaacgaagatttgaaaattgacacataccgttcaagtggtgcaggtggtcagcacgttaatacaacagattcagctgtgcgtattacacatattccaaccggtgttattgcgacttcttcagaaaaatcgcaaatccaaaaccgtgaaaaagcactaaaagtattaaaagcacgcttatttgatatgaaattacaagaagagcaacaaaaatatgctgcccaacgtaaatcagcagtgggtacaggagatcgttcagaacgtatcagaacctataactatccgcaaagccgtgtaacagatcatcgtattggtttaactttacaaaaattagaccaaattatggaaggtaagttggatgaaattattgatgctttaactttagcggaacaaactgataaattgaaagaattaaataatggtgaattataaaacattattaaatcaagctaaagtgaaatgcaatgaacaaggtattgaatcaacgcgtgccgaatggttaatgttggatttgtttaattggtctaaagccaattacttaatgcatatggatgatgaagtaacacttcaacataaaaacttatttgatgacgcaacacaaagaatgctaaatgatgaaccaatacaatatatcctaggtaaacaaacattctatggtgaagtttttaaagtgaataagcattgtcttattccaagacctgaaacagaagaagtaatgcttcatttttataatcaacttcattcaggagattgtgttgtagatataggcacggggagtgggaatataccgatttcattaaaaaaattggacccttcattagaagtttatgctacagatttatatacttcagcgttatctgtcgctaaggctaacgctaagatgcaccaagtagaaattagatttctacttggtgatacattaatgccactgattgagcacggcatcaaagtaaatggacttatttctaatccgccatatattgatgataatgatgcattaattatggataatacagtgttaaactatgaaccacatactgcgctttttgcaaaaaacaatggctatgatatctatgataaaattatagatcagttacgcgaagtattattgccaaatgcgaaagttgtgtttgaaattggatttaatcaaggacaaacattgaaacaacgtattattgagaaatatccaagtttagatgtacaaatcattaaagatataaataataacgaccgaataatttcatttgtttggtgatcataagttatgtgctaaacatgattaatcatgagagtgcataactttttattttgttttaaaatagataacaagatgaaagggtgtgtctaagtgaatacaaaaatatgggatttacgccaatctaataatcaattgaatacagataatgaactgaatgatataaaagtaatttttgaaaatggcggtttaattgctataccaactgaaactgtatacggattgggtgcagatgcacgtaatgaagcagcaattaaacacatttatagtgcgaaaggtagaccatctgacaatcctttaattgttcatatctataaagttgaacaaatacaagcttttacagataagctgtcaaaagaagttgaaatgttaatgaatgaattttggcctggaccgatttcatttattgttccattaaaaaaaggctatttatgtgaaagtgttagtggtgggttagattccattgcagtgcgtatgccaagtcatccaatcggaagacaaatactaaaatatgttgatatgccaattgcggcacccagtgcaaatttgagtggcagaccctcaccgactacatttgaacatgtttatcgtgatttggacgggcgtatcgatggtattgtgaatggagaccaaagtgaagaggggttagaaagtactgtgctcgattgtacacaatttccatttaaaatcgctagacccggttctatcacaaaatctatgatagaagcggttattccagacagtgtgacaacaataggtacattagattctgaaaaaccaattgctccaggtatgaaatataaacattattcacctgatacaccagtaaaaatattgaagtcttttaatgcgttacctacatcgacttcaaattggacacaaacagcgtttatcgtacctcgtagcaaacaagcgttaataccagaagctgcgaaatttatacctttatgcgaagatgaaaatgatattaaaggggctaatcataatctttatcaaatattgcaccagttagaccaagacgatcaaattcaacatgcctttatttatggatttgatttgaatgataacactacggcaattatgaatagaatgatgaaagcggctaatcaatctattattgaaggagcagatttatgaaaatcatttttgtttgtacaggaaatacttgtaggagtcctatggctgaaagtatcgctcagtccaaattacctaaccatacaattgtgtcacgtggtatgtatgctatagatggtcaaccgatatcagatcatactaaggaaattttacttgagcgtcatttaaatgtgccataccaagcccagtcttttactgcttcagatataaatgcagatttaatattgacgatgggttcatctcataagcgcataattaaggaattgtatgataacaccgatcacgtatttactttaaatgagtatgtagacaagataggagaggtttccgatccgtttggtgggagtaaatctgcatatcttgaaatatataatgaattaaatttactgatagatagtttaaaaaataaaatattaaactaataaattagtgaaattagtataagtacgttagtaaatacgttataataaaaacgtgtagcaaatttgctatcagtcaattttgtatgttttaaagcggtttgagattcaattactttttatgtcattaataaaaaggggtgcaagaatggaagatttgaagttattgttagatgaattaaaatcacaatcttttttcaaggctaatgaattatgcattatcggttgttcaacatcagaagtcattggtgaacgcattggtagtgtaggttctatggaagtagctaaagaaatatttaattcattgaaagtaatcgaaaatgaaacgggcgtttcttttgtatatcaaggttgtgaacatataaacagagcggtaacaatagaaagagcacaattcaatcccctcacgatggaagaagttacggttgtaccagatgttcatgctggcggaagtcttgccacttatgcatacaagcatatggatgaaccaatagttgttgaacatatatcggtacctaaaggtattgatattggtcaaacccttattggaatgcacatcaagcatgtcgctattccagaacgtacaagtgttaagcaaattggtgaagcaattgtaaccatcgcttcttcaagacctaagaaaattggtggcgaaagagcaaaatataactaatacagaaacgagggaattaccaatgtcatttattcaaaagcaagataaagaaatatatgaagtgattcaaaatgaatttaaccgtcaaaataacaatatcgagctcattgcttcagagaactttgtttcagaagcagttatggaagcccaaggatcagtgttaacgaacaagtatgctgaaggctatcctaatagaagatattatggcggttgtgaatacgtagatgtgtcagaaacattagctattgatcgtgctaaaaaattatttggcgcagaacatgttaatgttcaaccacactcaggatctcaggccaatatggctgtttatctcgtagcattagaacacggtgatactgtattaggtatgaatttaagccacggtggccatttaacacatggtgcacctgtgaactttagtggtcaattttataactttgtggaatatggtgtagaccaagaaaatgagcaaattgattatgatgaagtattaaaagttgctaaagaacataaacctaaattaattgttgctggtgcatcagcttattcaagaacaatcgatttcaaacgattcaaagaaattgctgatgaagttggcgcaaaattaatggttgatatggcacatatcgctggtttagtcgcagttggtttacatccaaatcctgtggaatatgcagattttgtaacgacaactacacataaaacattacgcggacctcgtggtggcatgattttatgtaaagaagaatataaaaaacaaattgataaaacgatattcccaggtatccaaggtggcccattagagcatgtgattgctgctaaagcagttgcatttggtgaggcattacaagatgactttaaagtttatcaacaacaagtgattcaaaatgctaaaacattggctaacacattgactgacgaaggatttagagttgtatctggaggcacagataatcacctcgtcgcagtagacgtcaaaggttctgtgggtattacaggtaaagttgctgaagaaacactagatgcaattggaataacttgtaataaaaatacaattccttttgatcaagagaaacctttcgtaacgagtggtattcgtttaggtaccccagctgcaacaacacgtggttttgatgaaactgcttttgaagaagttgcgaaaatcattagtttagttttaaaagacccagaaaatgaaaaagcattagccgaagggaaagaaagagttaatactttaacttcaaaacatcctttatataattaaaaattggaggaaataaatttatgggcaaagtacatgtttttgatcacccacttattcaacacaaattaagttatatccgtgacgtacatactgggactaaagaatttagagagctagtagatgaagtaggtatgttaatggcatatgaagttacaagagatttagaattacaggatgtggaaatagaaacaccagtaacaaaaatgattgctaaaagattaacaggtaaaaaattagcgtttgtaccaatcttaagagcaggattagggatgacacaaggtattttaacattagtacctgcagctagaataggtcatgtgggtctttatagagatcctgaaacactagaagccattgaatattttgtgaaattaccacaagatattgaagaaagagaaattgtagttgtagacccaatgttagcaacaggtgcttcagctatagaagctattaattcattaaaaaaacgtggtgctaaaaatattcgttttatgtgtttaatcgctgcccctgaaggtgtagaaaaattacaagcagctcatgaagatgtggatatatttatcgctgcattagatgaaaagcttgatgatcatgcatatatcacaccaggtttaggtgatgcaggtgaccgtttattcggtacaaaatagtttcgcccaggagtggagtaaaatgaaaaaaataatgactgtcttcggcacacgtccagaagcagtaaaaatggcacctctaattcaagcgttgaaacatgacgatgcgctagaacctatcgtagttgttacggctcaacatagagaaatgcttgattcagttctgactagcttccacatcacaccagattatgatttggatatcatgaaacaaggccagtcactgtctgaaattacgtcacgtattttatcgagactagaggatgttataaagaaagaacaaccagatatgatactcgttcatggtgacacaatgacgacgtttgctggtagtttagcagcattatataatcagattcctataggtcatgtcgaggctggcttaagaacatgggataaatatgctccatttcctgaagaaatgaatagacaaatggtaggggtaatggcagatttgaattttgcccctaccaataatgctgctcacaatcttttagcagaaaacaaaccagaggaatcaatcgttgtgacaggtaatacggctatagatgctatgaagacgacaatacatgattactatcattctgagattatagcaaagcataaagataaacgtatcattttgttaactgcgcaccgacgtgaaaatattggtgaacctatggtgcatatatttaaagctgttagagatattgtcgaagcatttgaagatgtcgttgtggtttacccagtgcataaaaatcctaaagttagggaaattgcagaaacttatttatcaaatcacgagcgaattgaattggtggaaccattggaagtcgtggattttcataattttgcccatcaatcatacttgatattaacagattctggaggtgtgcaagaagaagcgccttcattaggtaaacctgtacttgtgttaagagatgctacagaaagacccgaaggtgtgaatgctggtacgattaaaatagtaggcacccacgagaaaaacatatttgattctacgaaacaattattagatgacaaaatgttatatgacaaaatgagccatgcacgaaatccttatggagatggaaatgccgctttacgaatttgtgagaatatcaaatattattttcatataatttccaaaaagccagaatcattcaaataattaaaaagggggaatgtgtcggttctgtgacaatttgagaaaaaattaaactacattttgtatagaattgacacgttaactacccctatattattattaaaactgtatgattgaaatggttctcattattgcatgaaaaagatgaagcgaggcatagtcatggaacgtttcaacatcatttttaatagatacattcaatactatttatatggtatagttgtactattaattgtgtttattttcacatactcaccatttatattaggacttataataggtacaattggatcactttttaatacttttactttcgaatattatttagcaaaggcaaaagaaaaagataacatacatatttcaacgggcaacgtttggagatatttaatagtggttctagcatgttgtatttggtatttttataaggatgaaattaatatcattggtgtggttattggtttaatgatttcatatgttttaattgttttcaaaccatttttacacaagaaataaattttaaaacgaaagaggtgagaaagcatgaatcataaagaccctctagtcagctggaatgtatttggtctagacgtcgtgtttaatctttcatcaattatgatgttgattattacagcagttattgtttttgtcatagctattatttgtacacgcaacctcaaaaaacgaccaactggtaaacaaaatttcatagagtgggtttttgactttgtaagaggtattattgaaagtaacatggcatggtcaaaaggtgggcaattccatttcttggcagtaacacttatattctttatatttgtgagtaatatgctaggacttccatttcaattaatttcagggcatacgttgtggtggaaatcaccaacagctgatgcgacagttactttaacgctgtcaacactcatcattctattaacacatttttatggtgttagaatgaaaggtacaaaaggttatttccaaaactatacaaaaccaatctttttattaccaattaatatctttgaagaattcacttcaactttaacgttaggtcttcgactctacggtaatattttcgcaggtgaattgctattaggattattggcaggattagtaacaggtgattcaactagagcatggggttggataatcggtttacctggtttagttgtttggcaagggttttcaattttcatcggtacaattcaagcatatattttcgttatgctttcaatggtttacatgtcccataaagttcaggacagtcattaattaattaaattttaaagaaaaactaggaggattttataaatgaatttaatcgcagcagcaatcgcaatcggcttatcagcattaggtgcaggtattggtaatggtcttatcgtttcaagaacagtagaaggtgtcgctcgtcaaccagaagcacgtggacaattaatgggtattatgttcatcggtatcggtttagttgaagcattacctatcattggtgtagttatcgctttcatgtcactataattcaactaattattatggcgaagtctgaaagactttcgccgttcgtttttatcaataatgtcttatgattataatgtatgaaaggagtgtctatgtaagtgactgctacgacaaatatgtttgtacttggtgcagctggaactagcggcgttcaatgggggacaataatcgttacgcttgtaacttttcttatcttattagctttattgaaaaagttcgcatggggtccattaaaagatgtaatggataaacgtgaacacgatattaataaagacattgatgatgctgaacaagctaaattaaatgcacaaaagttagaagaacaaaataaacaaacactaaaagaaacacaagatgaggttcaaaagattttagaagaatctaaagttcaagcacgaaaacaacatgaagaaattattcatgaagcaaatatcagagctaatggcatgattgaaactgcacagaatgaaatcaacagtgaaaaagaacgtgcaattgcagatattaacaaccaagtttctgagctttctgttttaatcgcttctaaagtactgcaaaaagaaatctcagataaagatcaaaaagctttagttgaaaagtacataaaagaggcaggcgataagtaatggcaaacatagcaaaaaaatatgccaaagcattatttgatactgctaaagatgcagacatacttgacgacatgtacgatgaattttcaacaattaatgaagcagttcaatctgaaaataaaaagctacaagcattggatgcagatccacaaaaagatgttgagcaacgtcgtcgcttcgtaagcattgtatttggacaaacgaaccaatacttgcagaatatgctgacaatacttgctagcaatcgtcatttaggacacattcatgaaatatatatcgcgtttgaaacattatataatgaagagcataatcaagactatgctgtaatcgaatccgtatatcaattgtcagaagaagaattatcaagtatagaagaaattattaaagcacgaactaaactttctaaaataatgattactaacaaaatcaatcctgaacttatcggtggtatcagagttaaagttggtacgaaagtgatggacgcaagtattaaaaatgatcttgcgcaattagaaagacaatttattagagtgaaataaaatttgaaggagtgacatagatggccattaaagctgaagaaatcagtgcattacttcgctcacaaatcgaaaattatgagtcggaaatggcagttactgatgtaggtacagtactacaaattggtgacggtatcgcattaatccacggattaaacgatgttatggctggtgagctaatagaattcaaaagtggcgttctaggcttagcacaaaacttagaagaatcaaatgtcggtgtagttattttaggaccatacgctgatatcaaagaaggggacgaagtaaaacgtactggacgtattatggaagttcctgtaggtaacgaacttattggtcgtgttgtgaacccacttggacaacctattgatggacaaggtccagttaatacaacaagcacaagacctgtagagaaaaaagcaacaggtgtaatggaccgtaaatcagttgatgaaccattacaaactggtattaaagccattgatgcacttgtaccaattggtcgtggtcaacgtgaattaatcattggtgaccgtcaaacaggtaaaactacggttgctattgatacaattttaaaccaagctgatcaagatacaatttgtatttatgttgctattggacaaaaagattcaactgttcgtgctaatgttgaaaagctacgccaagaaggcgcgttagattacacaattgttgtttctgcttcagcagctgacccagctccaatgctttatattgcaccatattcaggtgtagctatggctgaagaattcatgtttgctggtaaagacgttttaattgtttatgatgatttaacgaaacaagctgcagcttaccgtgagttatcactattattacgtagaccaccaggccgtgaagcatacccaggtgatgtgttctacttacatagtagattacttgaaagagcagcgaagttaaatgatgatttaggtggaggctctattactgccttaccaattatagaaacacaagcaggcgatatcgcagcttatgtaccaactaacgttatttcaattacagatggacaaatcttcttacaatctgatttattcttctcaggtgtaagacctgccattaatgctggtcaatctgtatcacgtgttggtggttctgcacagataaaagcaatgaaaaaagttgctggtacgttacgtttagatttagcttcttatcgtgaattagagtcatttgcacaatttggttcagatttagatgagtttacagctaaaaaattagaacgtggtaaacgtacggttgaaatcttaaaacaagataaaaacaaaccactacctgtcgaaaatcaagtattaattatttatgcattgactaaaggttatttagatgacatcccagtagaagatattactcgtttcgaggaagaattaaatctttgggctaagtctaatgcgactgaactattaaatgaaattaaaacttcaggtgcattaccaaaagatgaagcatttgaatcagcaattacagaattcaaaaaaagctttagcaaatcagaagcataatagttaatcttaaataaaaggtggtgagataatgggatctcttaaagagattgatacacgtataaaatcaaccaaaaaaatgaagcaaattacgaaagcaatgaacatggtatcaagttctaaattgcgccgtgcggaaagcaacgcgaaacagttcagaccatatatggaaaaaatgcaagatgcaattactgcagttgcaggttcagataaaaattcacgtcacccaatgttacaacaacgggaagtgaagaaaagtgcctacctagtgattacaagtgataaaggtcttgcaggtgcttacaatgcaaacgtattaaaacaccttataaaagatattgaagaaaaacatgcaagtaaagatgattattcaattgtagtattaggtcaaactggtgtggatttccttaaaaataaaggttatgacatacatgattcacttatagatgtaccagatcaaccttcttttaaagaagtacaagcaatagctaaaaaagctataggtttgtatagtgaaggagaagttgatgaggtgaaaatttattttagtcatttcgtaagtgtattagaaaatacaccttctaccaaaactgtgcttccattgtctcctgaggactctagcttaggacatggtcaaatgtcatcatatgagttcgaaccagacaaagaggcaatattgagcgtcattttacctcaatatgttgaaagtttaatatatggaacgattttagatgcaaaagcaagtgaacatgctacgcgtatgactgcaatgaaaaatgcatcagataatgcgtcagaaattattgatgacttatctattcaatataacagagcaagacaagcagcaattactcaacaaatcactgaaattgtcggtggctcagttgcgcttgaataattattaaaggaggaaaaaaacatgggattaggccgtgtaactcaagttatgggtccagtaattgatgttcgctttgagcacaatgaagttccagaaattaacaatgccttagtcgtagacgttgaaagagatgaaggtacagtatctcttacattagaagtggcattacaacttggcgatgatgtcgtacgtacaattgcaatggattctactgatggtgttaaacgtggtacagaagttcgagatagcggagatagcatcagtgttccagttggtgatgctacgttaggacgtgtgtttaatgttcttggtgatacaattgacttagacgagaagcttgatacttctgtcaaacgtgatccaattcatagagaagcacctgcattcgatcaattatcaacaaaagttgaaatcttagaaacaggtattaaagtaattgatttacttgcaccatatattaaaggtggtaaaatcggtttattcggtggcgctggtgtaggtaaaacagtattaattcaagaattaattaataatatagctcaagaacatggtggtatttcagtatttgccggcgtaggtgaacgtacgcgtgaaggtaatgacttatactacgaaatgagtgatagtggtgttattaagaaaacagctatggtcttcggacaaatgaatgagccacctggtgcgcgtatgcgtgttgctttatcaggcttaacaatggctgaacacttccgtgatgtacaaggacaagatgttttactatttattgataacatattcagatttacgcaagctggttcagaagtatcagcactattaggtcgtatgccatcagccgttggttatcaacctacccttgctactgaaatgggtcaattacaagaacgtattacatcaacaactaaaggatctgtaacgtcaatccaagcagttttcgtacctgccgatgattatactgacccagcaccagcagctgtctttgctcacttagatgctacaactaaccttgaacgtaaattaacggaaatgggtatttatcctgccgttgatccgcttgcatctacttctagggcattagaccctacaatcgttggtcaagatcattatgaaatagctcgtgatgtacaatctacattacaaaaatatagagaattacaagatattattgctattttaggtatggatgaattatcagaagaagataaacaaactgttgaacgtgcacgtcgtatccagttcttcttatcacaaaacttccacgtagctgaacaatttactggtcaaaaaggttcatatgtacctgttcaaaaaacggtagaaggcttcaaagcaattttagatggcgaatatgatcatattcctgaagatgcattccgtcttgtaggtagtatggaagaagtaatcgcaaaagctaaagatatgggtgttgaagtttaaaaattaggaggtaaagataatgaacacattaagcctaaatattgtcactcctaatggttctgtttacgaccgagaagatgttaatcttgcagtattacaaactactgcaggagaaatcggtgttatgtatggacatattccaacagttgcagcacttgaaattggctatgtcaaaataaattttgacggtggttcagaatatattgcagtgagtgaaggttttgttgaggttagacaagataaattatcaattattgtacaaactgcagaacctgcgaatgaaatagatgttgctagagctgaattagcaaaatctagagcagaatctcatttgaataatgaagaagataacagcgacgttaatagagctaaacgtgctttagaaagagcgaataaccgcattcgcgtcgcgaacttacaataaattatatcattggtgagtgggatgttactttttccatttaggcatctactactcactccaaaaagagtctaagacatgaaaaatgtcttagactctttttttagagacgtaagttcgtatagtaaagtagacacaaaaataaaaagtgaagtgctcaaacaacaaaagcattatagttaattaaattctgcagttcttaagtatcttttaatgattatttcgtgtaaaataaattgacagtctaaagtgaggagttattgtatggagtatctaggacaattttcaattgtacatcttatcttacatgtggtttgtatttgtattgcttattgggcattaaatgcagtgagattagagcagttttttaaaaaggggtatcccttacaagttcaaatttgtatgatttttttagcaatattacttggaacagctgttagtaattttattgtggatttgttacaatactcaacgcaaataaaatatttagcacaataattcaaatacttgtatatctttttgaattatagatataataatttagaagtacataaaatagtttaattaaaatgaaatatataagtagcaaagtggaggatttaagatggatatgatagaaattaatggtggaaatagattaactggtgaggttaaagtgtcaggtgccaagaatgctgtattaccagtattaactgcttcacttttagcatcagaaggtgtcagtaaacttatgaatgtacctgcattaagtgatgtagaaacgattaataatgtgatttcaacattaaatgcagaagtttcatacgataaagacgaagaatcagtaactgtagatgcaacgaaagaattaaatgaagaggcaccatatgaatatgtaagtaaaatgagagcaagtattcttgttatgggtccattattagcccgcttaggtcatgctaaagtcgcattgccaggtggttgcgcaattggttcaagaccaattgaacagcacatcaaaggtttcgaagaacttggtgctgatattcatatggatggtggttttatttatgcaagtactgaaaatggattaaaaggtacaaccattcatttagacttcccaagtgttggcgcaacgcaaaatattatcatggcagcttcactagcagaaggtaaaacagtattagaaaatgttgcaagagaaccagaaatcgttgatttagcaaattatattaacgaaatgggaggtaacgtttctggagctggcacggatacgatcattatccatggtgtagaaacacttcacggtgtggaacacgcgattattcctgatagaattgaagcaggtacactcctgattgctggtgcgattacacgtggtgatgtacttgtaaatggtgctataaaagaacatatgacaagccttgtttacaaattggaagaaatgggtgtgaatctagattatcaagatgacgcaattcgcgtaagagtagaagatgaattaaaacccgtagatattaaaacattaccacatccaggattccctacggatatgcaatcacaaatgatggcattattactaacagctgaaggacataaagtagtaactgaaactgtatttgaaaatagatttatgcatgtagctgaatttaaacgtatgaacgctaagatttctgtcgaaggcagaagtgctaagattgaaggtaagagtgaactacaaggtgcacaagtaaaagctactgacttacgtgcagcagcagcacttatattagccggacttgtagctgatggaacgacgcaagtaacagaattaaagcatttagacagaggttatgttgacttacacggtaaattagaagcactaggtgcagatataaaacgaacacaagcttaatacatgattcgcaattgaagtggcgattcaagaacaagatggaggaagtaaacaatggaaacaatttttgattataaccaaattaaagaaatcataccgcatagacaaccatttttattaattgatcgtgttgttgaatatgaagtaggtacacgttgtgtggctattaaacaagtatcaggtaatgaaccgtttttccaaggtcattttccggaatatgcagttatgcctggtgttttaattacagaagcgcttgctcaaacaggtgcagtagcgattttaaatagtgaagaaaataaagggaaacttgcattttttgctggaattgataaatgtcgcttcaaaaaacaagttactcctggagatactttaaaattagaagttgaaataacaaaaatgcgtgggccaatcggtaaaggtaacgcaaaagctaccgtcgatggtgaagtagcatgtagttgtgaattaacgtttgcaattcaagcaaagtaaataaaagacctcaagctcagttgtaaatacaacggtttgaggtcttttttatagtaattatttttctattttttcatcttttaatcttggtttagattgcatcatacgattgaaagattttttaagttcgtctcctgttaaaccttcatcaataagttgttctaataaactttctgcatatacttgtcttaatgtataaatatgacattcaaaaacgatggagattgtactttccagtttttttatgtttttaatcgtcgcatcaaaaagagccggatcatttgctggacgtgtaatcactacgcgtatatctaataaagtttcatcatccatatattgtttcattgtttcataatgataatctgaaataacaatttctaataaccaaccagttccactattttctttattgataataacgccatcttctatttcatattctgtaacgccaccactatctgatacgatttgaaatcgaacagctttaaatgatttcatcgtcctcacatccaattaataaatttaacttctacaattattcgaattatacaatcattataacgtaattttaaaagggaaaggtaaaatttgtagaatttagtattaaaacatcttttgaattctgtgttattgtactttgacggtattgtgtaaaattcatagaatatagttataaaggaggtgacatatgattaataacattgttatcgtagggcgactaactaaggaccctaaaatatatgataaggaggagaaaaaattagctacattttgtgtagctgtatcaaggaactataaagataagaatcaaaccccggtatgtgattatttattttgtaaagcatttggaaaaatggcaacaaacattgagaaatatacgaagcaaggctcacttgtaggtataacaggccaaatgcaatcacataaatatgaaaaagaaggtcagacgcattttgtatcagaaatacttattgaatcaattaaattcatgtctccacaaaacaaagataaaaatgatttactttttgaaccattcccgctagagcattcccaaaatgcatttaaagacattaacgtacaaaataatgatatatatgaaattgtataaaccacccaccctaaatctacccctaatctaatcatccactttaatatacatttaaatcctactatcaattatacttctattggctatccctcttaaaatatccctataagagggatagcttatttaatataggatcagcaatcaaatcgctaataagtaatttaaataaaactgaataatctgatatattacaatcatattacgtgaaattttacttttcatagcctttaaaaactatcacagaagtttttaaagggataaaaaattatattcaaagataaattaaatgtaatttcattgtaaaaaaagccgattttttttattttactgtaacctacaacgattttttgaatgttatagttgtatttgcaaattaatcataaataaaaataaacttaattaccttataggaggacttttttacaatgaaaaaaacagtagtagcatcaacattagcagttggacttggcgtaacaggattcgcagcaggaaattcagcagacgcttcagaacaaggcgttgacaaagcacaattagcacaacaagctcaaagtaatccagaatcattaaatgaagcgccagtacaagacggtgcttataatataaactttaattacaataatactgattatagcttccaatcagacggtcaatattggacttggagctatggacaaggttcaactaatgcaccagcacaagaaactgctgagcaaccacaacaagttgaacaaccacaacaaactgagcaagcttcaactgaacaaccagcagaagaagctgcaccacaaactgaagaaacacaacaaccacaacaagaagcaactacacaaactacttcaagctcaaatgaatcaacttcaaatgaatctagttcaagtgaagcttcagaaggttcatcagtaaatgttaactctcatttacaagcaatcgcgcaacgtgaatcaggcggcgaccttaaagctgttaacccatcatcaggtgcagcaggaaaatatcaattcttacaaagcacatgggattcagtagcaccatctgaatatcaaggtgtatcaccaacagaagcacctgaagcagtacaagacgcagcagctgttaaactttacaacacagcaggcgcttcacaatgggttactgcataaaaaattaagtgtagtaatgaacttaagataaatatttaaagctgagacatatatgtctcagctttttttatagtcagttattttgcaaatttgtcagtattttgttatcttttaattaaataaaatataaaaacgctactaggggagccagttggctgagatgattaaattcagacccttacaacctgatttggttaataccaacgtaggaaagtagtttaatctaaagttggggtataaatcctcgctattaattaactacgtttctgtcgggaatgtagtttttttatttataggaggatttttgtgttattttcagaacagttaaaaaaagaagctaaaccaattattaatcaaatctaccacgatccatttatacaaggtatgttacatgggaatttaccgactgaagcaaccaaattctatttaagagcagatgcttcttatttaaatgaatttgcgaatatatacgcactgttaattccaaaaatggggaacttaaatgatgttcgatttttggttgaacaaattcaatttatagtagatggtgaagtggaagcacatgaaattttagcggattatgtccaagaaagttataatgaaatcgtacaagagaaagtttggccaccgagtggcgatcattatattaaacatatgtatttcaatgcgtatgctaaagaaaatgctgcttatacgattgctgcaatggcaccttgtccttatgtttatcaattcattgctcaagaagcattaagggataaagaattaaataaagattctattttagctaaatggtttgaattttatagtactgaaatggatgaattagttattgtatttgataatttaatggataaattgacgaagcattgtagtgaaaaagaaaaaaatgagataaaacaatgctttttacaaagtacagtacatgaaagaaacttttttaatatgtcatttaatgaagaatcatggtcatatggaggtatgaaaaatgaataaacccaatattgcattgacaattgctggtactgatccaacaggaggtgctggtgtaatggcagatttgaaatcttttcatgcttgtggcgtatatggtatggtggctgttacaagcattgttgcgcaaaacactaaaggtgtacaacatattcacaatcttgagccacagtggttatctgaacaactggcaagtgtgtttgatgacgaattaccacatgccattaaaactggtatgattgcttcaaaggaaatgatgcaattaattcaagaatacttagtgaaatatcctgagataccatatgttattgatccagttatgttagctaaaagtggtgattcattgatggatgatgacgcgaaagcagatttacaaaatatattgttaccctatgcaacagtagcgactccaaacttaccagaagctgaagaaatcactggattaaagattgataatgaggcagcgatatataaagcaggcaacatatttattaatgaaattgggagtaagggtgttgttattaaaggcggacatgctgaagatttagaaactgctaaagattatttatttactaaagatgaggtctatacgtttgaagaacctcgttatgatacgcagcatacccatggtacaggttgtactttttcagcagtaattacagctgaactggcaaaaggtagaacgatttatgacgcagtgaaaaaagctaaaaaatttatttcattaagcattaaatatacgccagaaattggtcaaggtagaggacctgtaaatcactttgcatatatgaaaaaggtaggtctagatgatgaatagtttaaataatttaagaacgaataatccactcgttatttgttacacaaacgatgtcgtaaagaactttacggcaaacggacttttaagtttgggtgcaagcccagcaatgagtcaagcacctgaagaagcgatagatatgttaacacctgctaatgcactgctcattaatattggtactttaactaaagatagagagcaggacattttagaaattgctaaaacagctaatgaagtaggcacgccaattgtatttgatccagttgctgtcggtgcatcccaatatcgcaaggatttttgtaaaacttttttaaatactgtagatgtagtagttataaaagggaatgcatctgaaattttagcgttgataaataatgatgctaagatgaaaggaacggacagtgatgataatttaaatgcgatagaaattgccaaagaagcgcataaacgattaaatagtgcgataatcatcactggcaaagaggatgttgtgattcaagacaatcaaatatatcaactgaataatggatcggctttgttggccaaagtaacgggtgcaggctgtttattaggtgctgtcatagctagttttttaccgacagatgaaacaacttcaatcagccagttagttgaagccacttcaatttataatatcgctgcggaaaaggcagagcaacttgcggaagacaaaggtcctggtacatttatgacgttattattagatgcactatatcaagtgacttatgatgattattcaaatcaaagtgatatacaagaggtgcagtaatgtttgataaaaataatttgaaactgtattttatttgtggcacgcaagatattgaaagtaagacaactattatagatgttgtgactgaagcacttgaatctggaataaccatgttccaatttagagaaaaaggtaacggtgcattaattggagatgaaaaagaggacttagcacggaaattattagctttgtgtcatgattatgcagtaccatttatcgttaatgatgatgttgccttagccaataagattggtgcggatgggattcatattggtcaggatgatatggatgttaaagtatttgctgaacaatttaaaggaaaaattattggtttaagcattagtaatatagatgaatataaaacatctaatttagcacatgtggactatattggcgttgggccaatgtacgcaacgacatctaaagatgatgcaaatttaccagtagggccagaaatgataacgaaattaagagcgcatgttaatcattttccaatcgtagcaatcggtggtataaatgttgaaaatacgagggaagttatgcaagctggtgcagacggtatatccattatttcagctattacaaagagtgaaaatatttcaaatacaattagtcaattcttacaaaatgttgaataaagtataaatatttctttttttgttttctacttccctttgagtatgataaaataaattctatgtgaatatatcattagaggtggaaaaatgaaaaagaaagcactactacctttattattaggtgtaatggtctttttagcaggctgtgactattctaaacctgaaaatagagacggtttcttctataatacgttttatgtgccaatggataatgtaatacattggttgggaactagttttaataatgactatggtttagcaatcgtagtacttgtgttagtaatacgtatcgtattgttaccattcatgttatcaaactataaaaatagtcatatgatgcgtgaaaaaatgaaagttgcaaaaccggatattgatgcaattcaagagaaggttaagcgttcgcgtacacaagaagaaaaaatggcagcaaactcagaaatgatggaagtttataaaaaatacgatatgaatccgatgaagagcatgttaggatgtttaccaatccttattcaaatgccaatcattatgggactattcttcgtattgaaatatccatcaagcggtggatttacagaacatccttatttcttatggtttaacctagcgaaaccagacatttggattacaattattgcaggtatcttatacttcttacaagcatacgtatcaagtaagagtatgccagcagaacaacgtcaaatgggttacatgatgatggtcatttcaccaattatgattgtgtggatttcattctcatctgtttcagcattaggtctatattggtcagtcagtgcggcattcttgattgtacaaacgcaagtagcgaatatgtactactctaaacttgcacaaagagaagttgcaccgatgattgaagctatggagaaaaataaagctgaagcatcaggtaaaggtaaaaatacgcaagttgtttctaagaaaaataaaaagaaataataagttaaactatttttaagaactaaaaaagcacaatctactcagtaggttgtgcttttttgtatgattacaatgttttatctaaaaataccattcttcgaaaaattgattgataaaattttccatatattgatgtctttgcgctgctaattgttttgctgtttctgtatgcattaatgactttaatttcaaaagcttttcataaaaatgtttgatcgctgatggcgaccattgatcataatgtgcgtcatccgtctctgttatatgctttgttgaatgctcaacccacatgggttcattaaaatgacccgcaaattggaaagtgcgtgcaataccaatcgctcctattgcgtctagtctatctgcatcacgtacaatttgtccttcaagtgttaatgaaacttcattattttgaccatgtctataacttatatgtttaattatatgtaatatatgttgttgctgttctttaggtaattgtaagtctttcaaaaagctttttaacttagttaacgctttttcatgattggttaatttactatctacagtgtcatgtaataaacttgctagttgaattgttaacatgtgttgcgattgttcttgttcagctatataagttgctaaacgcaatacacgattaatatgtgcaatatcatggccagtcgcgtcatctttatgatatgtacacatgtaattatatgcacggtttagtatttcagtttctttcaaattagctacacctctcagtttagtcatattaaataaattcataaaataaaaggtctaagcaacagtagggaaattgttacgttagacctgattttttataaaatcggtgacaatagtcgtgaaataccttctttaaatttaatccataaacttctttgttcataaatttcttttgttaattgataagatacatgtaaatcactttcaaaagcggatcttaatgcttttgagatgtatgtatcatagataaatgcattaatttcaaaatttaatgtgaaactacgatgatccatattagttgtacctacacttgctacttcatcatctataacgagtgtcttagaatgtaggaagccattgttataatggaagatattgacacctgcatctaaaagggaagctacattattataagtcgcccaataaacaaaagggtgatcgggcttgtttggaatcataatatttacgtcaacaccacccagtgcagctattttgactgcatcaagaaatgcttgatcaggtatgaaatagggcgattgaatataaatagatttttttgctgaagcaatcatttttaaataaccgtatttaatttgttcccaggtttcatcgggaccacttgaagcgatttgtacaccggttgtaccacctgaatcaacatcagggaaataacgttcagcataagataagcgatcacgtgttgattgtgaattccaatcaagcataaaacgtaattgtaaggcattcacagcatctccaacaattcttagatgtgtgtctctccagtaaccaaattttttcttaagacctaaatactcatcacccacattgaatccacctacgtaaccaatatgaccatcgataaccacgattttacggtggttccgattattcattctcagattaattaaaggcaatttagaagggaaaaatgcttcaacatggccacctttttttctaaagttcttaaaatgttttagagataaacccctagaccccatatcgtcgtatagcattttcacttcaatgccttcttcgagtttctgctcaagtgcagatagtatctttttcccgagattatcatttctaaatatataatattggatatgaatatagtctgttgcattattaatatcatttagcagtgcatcaaatttttctttgccatctgtatagatactaatttcattatctgttgttaagaacgcagcattattgtataacaacatttgtaccatatctttaaatttcacaatttgatgattgccttttgaaaaatcatcattttttaaagcttctaattgctcattaacaatcatttcaatgccaattttatcttcatcatttaaggaaaatatatggtcccgctgaatttgtctgccaatgaataagtaaatgataaatcctaaaattggtatcagcacaagtactagtagccatgcccaaattgaaccagcagatctacgttccataaaaataattgtaaaagcaaagattaggtttaatataaacgcgccaattaatataatattaatgatgacgttcgtgtgattaaacataattgaaaagatatctatcatattaaacctccaacaaatagcacagtaattaaataatgtaaaagtctccactattgtaacatggagaacatgttttatcacttgactaatacctaacaggggtatattatatgatgggtatagaataggaggcgtttgagaaatgactgaaatacaaaaagcgcatcattcagaagaaataaaagcaaatttaaaatcaagacttaatagaatcgaaggtcaagttaaagccataaatcgtatggtagaggaagatgtgtactgtgacgatgtgcttacacaaataagagctacgcgatccgcattaaatagtgtcgctactaaattattagatcatcatatgaaaagttgtattatggataaagttgaacagggtcatgaacaagaagcgatggaagaactacttgtaacttttcaaaaattgatgaaggattaaataaggtgaaacatatgcaatcaaaagttatttatattgctgaactttataatgagaagcaaaaattacaaattgaagaaagactaatgaaactttatggtgtgtttaaagttagtatagatatagaagaaggcgcaatctttgtagattttgaaacgcctgcaaatttgaataatttagaaaaagaagtgtacgatttaggttataaaataatttattaatctatctaaagggtatatatattgtaggactatataaaatgtaatgaattaattcttcatatataacagtacaaaggatagtttataattagtgaaatttcacattaaaaactctgtttttttgaattaaaataaaaaaattgaatataatgtggtattttacatttaaatagggtaatatgtaatagaagcaatagattaggagtgatgatatgagtaaggataacgaaaaaattcaaaatgtagttaaactattatcatcattaggggtaaacataaagaaaaccaaatcaagattagaagttatgcacactttaccaacgactgtgaaagccgctaacgaattgaaatagtcaagttacccaatcaagtgattagagcccattgttctggtcactttttattttgccttataatagtttagaaaaaaggtcaaagccaatgtataaggtacattagataatgatacacatttaaaaattgaaataatttttaagggtaagatattagtgtaagtgtagtataaacttttataaatgtttaaaacgcataggatatagattaatttgtttaattatatagtatacatataaaaagctgggacatcgatgtcccagcttttttagtatgacaggtcatcatacattattctgttgtacgtaattgttgtttatcaccagagtattgtttgggctgatgatagtaaatagataaaagtacaccaataccacacatgagactccataatgaactaccgccataactaataaatggtagtggaataccagtgataggtagtaattggacagtcattccaatattttgtaatacgtggaataaaatgagtgaagcatatccaattatgaataatttactaaaaggtaattcaattttagttgctaagcgtacgagatggaatataaaggctaagaaaattaatattagaattactgagccaataaaaccaaattcttcaccaataactgaaaaaataaaatcggtatgattttctgggatgtatacttcaccgtgattaaatcctttaccaaatagctgaccagaaccgattgctttaagggattctgttaaatggtaaccatcaccactactgtacgtataaggatctaaccaagaattaattctacctagttgatatgttttaattcccaatgtgttttctataagtgaaggtttataaataatagacaatattaaagttgaacctattacgatacccgcaataaaaagcggtgctaatattttccatgaaataccactaacaatcatgacaccagcaataatagcgcaaataactagtgtagtaccaaggtcattttgtaataaaattaatcccataggtacaatcgaaatacctacaatttttagtaataatttaaaatcggtttctaatgatttattgaacgtgaattgattatgtctagaaatcaattttgcgagtgctagtatcaacacaatcttcataaattctgaaggctgtacactgataggccctagtttataccagcttttagcaccattaataattggtgtgattggtgtttcagggataataattaatatgaacagtccaatacataagataaaatataataaatatgtatatttcatgagctttttaggtgaaaccagcataatgagtaatgcaatggcaccgcccaaaacataatataaaatttgtctgatgctaaagttagccctatattgaccgccacccatagctgaattgataatcgtaacgcttacgaatgctaataatacgaggatgcctattaaaacccagtcaatccgccgtatccaatgattattttttaattgacgtgaagtactcatttcttactcctttaaacagctagatttctctatctttagtattatatatagattttaccgaactttaacatattttgctagaagtagggtgtcgatttaaaaaattataaatatgaagttttatgatatgtctttgcgaatgataaaagagaacaaaaaataaatgctttttataccacttaacaaatgcaaaaaaatattaaatcgtgatatgatgtagtttaagaattgtatatggaggctaaaaaatggctaaagaaaatgtatgtatcgtatacggaggaaaaagtgcagaacacgatgtttcaatattaacagcacaaaatgtcttgaacgcaattgataaggaacagtatcaaattgacattatttacataacaaatgatggtgcttggaaaaagaaagaaaacattgtagatacgattaacgatatcgactcattacgcttaatagatgttgaagcgggtgaaatttcaaaattattaagtcaaggaagtacaggaaatgcatatagtgcagtatttccattattacatgggcctaatggtgaagatggcacaatccaaggtttatttgaagttttagatataccgtatgttggtaatggcgttttagctgcctcaagttcaatggataaattggtaatgaagcaactctttgcgcatagaggtttaccacaattaccctatgttagctttttaagaagtgagtatcacaaatatgaaggtaacatcttaaaattagtacatgataaattagaatatccagtatttgtaaaaccagctaacctaggatctagtgtaggtattagtaaatgtaataatgaagaagagcttaaaaacggtatagaagaagctttccaatttgaccgcaagttagttatcgaacagggtattgaagcgcgtgaaattgaagttgctgtattgggaaatgactatccagaaacgacatggcctggagaagttatcaaagaagtggctttctatgactataaggcaaaatataaagacggaaaaataaaattagatattccagctgacttagacgaagaggttcaaatgacgttaagaaatatggctgttgaagcttttaaagcaacagactgtgcagggttactacgagctgatttctttgtaacagacgataatcaaatttttataaatgaaactaatgcgatgcctggattcactgcatttagcatgtacccaagcttatgggaaaatatgggtgtgagttactctgatttaattaagaaattaattgagttagctaaagaaaaacatgaagataaaaaacaaaataaatacaaaattgactgaggcgaataaattatgatagaggtaacgttagaacaaattaaaacatggattccatgtgaaatagaaaatgaatttatggatcatggtattaaaggtgtttctattgattcacgtgacattcacaatcaaaatttatttattccatttaaaggcgaacatgtagatggccataaatatgtagcacaagcacttaaagatggtgcaggtgctgcattttatcaaaaaggtgaaccgttagacgaaaatattgatggacctattatttgggtcgatgacacattagaagctttacaacatttagcaaaagcatatttagaatttgtcaatccacaagtcattgcagttactggttctaatggtaaaacaacaacgaaagatatgattgaaagtgtcttgaaaccacaatttaaagttaaaaagacgcaaggaaactataataatgaaataggtatgccattaaccattttacaattagatattgatactgaaatttccattcttgaaatgggcatgtcaggtttccacgaaattgaattattatctaaattagctcaacccgatattgccataatcactaatattggtgagtctcatatgcaagatttagggtcaagagaaggtattgctaaagctaaatcagaaattacacttggtttaaaaccaggaggcttatttatctatgacggtgacgaaccattactagaaccgtatgctaacgaaatacaaaatgctgatttagtaagttttggtaaaaattctgataatacgctggtaagtactattgaaacaatcaaagatcatggtattgcattcacaattaatcatgatgaacattatgaacttcctatcttaggtgaacataatatgaaaaatgctacgattgctattgcagtaggtaagagattaaatttaacataccaaactattttcaataatttgaaaaatgtcgtgcttactggcatgagaatggaacaacatcatacaaaagatgaaatacttgtcattaatgatgcttataatgcaagtccaacgagtatgaaagcggccatagacacactttctggcatggaaggtagaaaaattattgtccttggcgatgtattagaattaggtcctgatagtcaaatcatgcatgaagctgtaggactatattttgaagacaaagatattgacgcattatttacgcttggtaatgaggcggctcacattagtcatactggtaaagctttcgttaaaaagtctgaagcttttaaagaaaaagcagaccttattcgttcattaaaaggttatgttcaagcgaatgacaaagtattagtcaaaggatcaagaggaatgaaattagaagaagtggtggaagcgttaatttaaaaagattaactaccataaatatggaatcaatatattattgagctcaaagaacccgggacgtacaatcgtcttgggttctttattatatgagataatgaccaaatcaactgaataatgcggtagacagttttaaatataaaatgatattttatgaaactaagtgcttttatattaatcagttattattttactaagataaggtgaatcaaaaatttcattttattaaagtgtcatgcttaattattattttctttaaaatttgcataggctaaaagatttgtatggaaaatagtttggtttatgaatcatacttcataatatcattttataaaaatgcttaagtcataataattaagtggaataatttaatcattaacagaataaataaattaacaaatttttttcagaaagtaaaaagtaatatgaaaaaataaaattaaacgcttacaacctatgtatttcggcgtttataagctgagaaaacgtgatgattacaagagattcactcaatttattctaatttggtttattgcgattatgcacttgaggtggtactataaagaagttgaagaaacttaagtgaacatatatgtatagaaatacagataaataaaggagaattatattgcaaaattttaaagaattagggatctcagataagatggcagaaaccctacaatccatggggttcaatgaggccactcctattcaaaaagagagtatccctcttgccttagaaggcaaagatgttcttggtcaagcgcaaacaggtacaggtaaaacaggtgcgtttggtattccattaattgaaaaagtggcagaccaagaaggtgtacaatcattaatccttgcaccaacaagagagttagcaatgcaagttgctgaatcattaaaagcattcgctaaaggacaaaatattcaagttgttactgtatttggtggtatgccaatcgaccgtcaaattaaagcacttaaaaaaggtccacaaatcgtagtaggtacaccaggtcgtgtaattgaccatttaaaccgtcgtacattaaaaacgaatgatattcatacgcttatcctagatgaagcagatgaaatgatgaatatgggattcattgatgatatgaaattcatcatggacaaaattccagctgaacaacgtcaaacaatgttgttctcagctactatgcctaaagcaattcaaacattggttcaacaattcatgaaatcaccagttatcgttaaaacgatgaataatgaaatgtcagatccacaaattgaagaatattatactatcgtaaaagaattagagaaatttgatacttttacaagtttcttagatgtacaccaaccagaattagctatcgtattcggacgtacaaaacgtcgtgttgatgaattaacaagcgcgttaatctcaaaaggatacaaagctgaaggattacatggtgatatcactcaagctaaacgtttagaagtattgaaaaaattcaaaaatgatcaattagatattttagttgcaacagatgttgcggcaagaggacttgatatttcaggtgtaagtcacgtatacaactttgatatccctcaagatactgaaagttatacgcacagaattggtcgtactggtcgtgctggtaaaaaaggtgttgcaatcacatttgtaaatccaattgagatggattatattcgtcaaattgaacaagcaaacaaacgccaaatgacagctttaagaccgcctcatcgtaaagaagtgttaaaagcacgtgaaaacgatattaaaggtaaagtacaaaactggatgtcaagagacaatgaaccaagattacaacgtattgctacagagttacttggtgaatataatgatgtggatttaatcgcgtcattattacaagagctagtcgaatcaaacgacgaagttgatgttcaattaacatttgaaaaaccattatctcgcggtaaaggtcgtcaaggtaaaggtggaccaaaacgtggcggtaaccataaacgtggtggcggcaagtttgataacaagaaccgtcgttcaggtaaaggcggattcaacaataagaagaaaaatgatagaccttcttctgacagaaacaataacaagaaatcaatgaaaggtcgcacgtttgcagaccataaaaaataaaacgatttatcatatatgaaatttaggtttaatcactccatttatttggggtgatttttttatgttaaatggagtttagatgggaatgaaagaataaaatactttaatattttaattgtgttgatacatattttgaagtgaggatgaatgcgcactataccctgtgttataatgggggaaatcttaatgaaggagtgtatttatgacaaacgaccagctctttaaaaaaagtccaaaagaagctataaaatattattatttaatagaaggactagaatttatagtgcatttgatcgttatgatggtattaatattcttatggagccattttaattggtggcactttttaatttatatattcatttttcttatcttaatagatatagtttatgctgcatttggaccttggattaagtaccattatacatattatcgaattggtgaaaatgatatagaagttaaatatgattttttcttcaaatcacaaaaattcgtaaaattagaacgtatgcaatatatagaacgtaaatataatccaatactgaaaaggttaggtttagctaaagcatcattagtgactgctggtcatcatgcaacattcccattacttagcattaaagatgcagaaacatttgaagcgataagtcttgattatttgagaggagctgattatgatgtatagtcctcaaaaattacatccaatttcatatataacgggtgtgatcgaagcaatcaaacaaaatatcgttttaatcattatttttctagtgtttaatattcgtgattttgatttcactaatatttatgcttatattttcccaggtattgtaaccatattatttcttttttcattcatagctcaggttttaaaagtatataacacaagatattggattgaaaatgaccactttgtacttgctacaggtatttttaccaaagaaagaaaagagctcaatatacgacgtatccaaacacttgatacaacgcaaggcatcataaatcaaatcgttggcggtgttaaattacagattaaaaccccaagtgatggaattgatttggatactgtttctaaaaaacagagcgaatggatacaacaaactttaaaggaaaagcaacatgaactatctactagcgaagcacaagcagtagatcctgtatctacacaagagatcgatgattcagaattgacgaacgatgatatcaatgtaacgacaaatgaaacaaatgctaaagatgaagttaagtttttatataaattgaattttaaagaattgttatttatggcattaacgagtggagccattggtgttgccttcgctgcactttctccgataattgggggattgtcagacgttattccatgggattggataactgatgagttctcacaaatttcacaagcaatttttgtcattgtcttaatgatggttgcgaccattgccattgcgagttatatcatcgggacattaattgttattgtacgcaactttaattacacggtgacgaagcatggtaatcaattaaatattaagtatggactatttaatgttaaaaatattaccgttcccacagatagggtacaggctgtcgttgaaaagcaatcatttcttagaaaattgtttgggtatacatccattcattttgtaataacaagtgatatgaatgatatggataaagatgacgtatccttagatggcaatgtgatgatacttcctttcattaagcgtaaaaaagcatttgaaattattaaaactttaatgccgaatatgacgtttgaaaaagcaacagtaggtatgccgtggagaggttttcatcgccatttttggaaacaagctttgttacttatcatggtagctgcggtaattaattatttttgggcggcatgggcctttttaattgcaggagttattatattaatttttattgtgcgtagttaccttgtgactaaattttctggtatgaaattagttgaagatgaacttgtagtacgtaatgtcactttatttggatttaaaaatacttatttcaaacaagataaaatgttaggactagaagtacgacgtaccccatttttaattaatagtgacttaggtaattttaattttattattgcaaaagctgctggtaatgaacatattgggttgaaattcaatgcatatcaacgagttaaatccttacaatcatggtatttgagaggtgaacaaaatgagtaattatcagtatatgcacgcatctggtaaaacagtcatgcgcatagcagcgtcaattgttactgtgatattatgtgttttattagtagcgttttatttagtaaatcatttgtggctcgagtggtttgcacaagaaacaatgaaatggattttaattatcggtgcagtaatcatattgctgtatattattgtcgaattggttattgtacccaaatatcgttataaaatatttaaatataatctagaagatcacacgataacggttagaaatggtttgtggtttgtaaaagttgtgaagatgcctttattcagaatacaaaatgttgacacacacgaaggtattttaatgagaaaatatcagttagcaagtttaacattgtctacagctggaggaaatactgaaattaaactggtcaataaagaggtagccgctaagttaaaacaaactataaaacaagtgaatcaagatagtgctatagaaaacacaaatcattaaacgaaagccatataacaagatagcgttagtataaagacgttatatgggaggtaggagacggaaatgatacacggtataggtgtcgatttaattgaaataagtagaataaagaatctttataaacgtcaatcgaaactggttgatcgcattttaacaataaatgaacaacataagtttaatcaatttaataatgaacaacgaaaaatggaatttttagctggtcgatttgcaacgaaagaagcgtttagtaaagctttaggtagtggtttaggaaaaacagtatctttcacggatattgattgtgttaatgatgaagatggtaagccttgcatacattatgaggggtacaaagtacatgtgagtatttcgcatacagaacactatgcaatgagtcaggttattttagaggtttaaattaatttaggtgatttcagtttattaaatttggatatattatctgtattgttataaaattaagataatatatttattacacaggttatgaactgatataggaggtacgtgctttatgtctgataagtattatagatcgacttacgtcaatgtagatttaaatgcaatcgttgcaaattttcaagtctttcaaaaattacatccaaataagacggttatgccagtagtgaaagcaaatggttatggccttggaagtattaaggtagcaagacagctcatggataatggtgctgagttttttgctgtagcaactttggatgaagcgattgaattacgtatgcatggcattgatgctaagattttagttttaggcgttattccaacggagcatattaataaagcgattcaacatcgtgttgcaatcactgtaccatcaaaatcatggctagtagaagccgtgaaagaaattccagaatcaaatgaaaaagatttatggatacacgtaaaattagacacgggtatgggtagattaggtatgaagacagcagaagaatacaaagaagtcatagagcttattaatggccatagccatttaatatttgaaggtgtatttacgcatttcgcatgtgcagatgaacctggcgactcaatgaaccgccaacaaacaatgtttgaagaaatcgttggacaagccgataaaccagattatatacattcacaaaattctgctggtgctttgatgaaagacacacaattttgtaacgcagttagagtaggtatttccctatatggctattatccatccgcttatgttaaatcaaatgtgaaagtgcatttaaaaccaagtgcacagtggataagtgaaattgtacagacgaaattacttcatgcaggtgaatcagtcagttatggtagtgtatatacggctgacgaaaaaactaaaattggtgtcattccagtaggttatgcggatggttatcctagaatgatgaaaggtttctcagtgaatgtgaatggcaaacaatgtgaagtcataggaaaagtgtgcatggatcaaacaattattaaaattcctgatgagattcaagttggggataaagtaatcataatggatcatcacagcgataccccacaatcagccgaagcgctggcgcatcagcaacaaaccataaattatgaagtgttatgtcgcttgagtagaagactaccacgtgtttaccatagttctaaagacctagaaattcgcaatgaattactaaaatagtatagtcactgtttgtaaaatttgttatcatgtatctaacaaccaatctcgaagatttatattttagttacatggaggtctttattcatggcaagtttcaaccaaagtagaattcataatatagaacaacttttaaaagaaggctattctcaaatggctgatttgaacctctccctcgcagcagaagcatttccgtttgaatgtgaagcttgtgattgcaacgaagtatatattagctccaagaataataatgaatgatgagacgtggtgacgtttatttagctgatttatcaccagtccaggggtctgaacaagggggaataagacctgtcgtaattatacaaaacgatactggtaataaatatagtcctaccgtaattgtagccgcaattactggtaggataaataaagctaaaatacctacacatgtagaaatagaaaaaagtaaatataaattagataaagattctgttatattgctagagcagattagaactttagataaaaataggctgaaagaaaaattaacttatctttctgataaaaaaatgaaagaagttaataatgccattgatattagtttaggattacatactattaggagtcacaaagcctgattttcaaaggtttacctaataagttaataaaatagtgaattatagacattgattctctataacatgcaataatcatttattaatgaattaatcaattttaaccaagattgcttttaataaatggtagtgacctttgaataagatgtctaatttaaaagctttagggtttcctaaagcttttttaagtatctaaagtacatttaataaaagatgcatgaatatttaacaattaaagttgttttattcaatggagcgattgacatacatacagaacatttgaatatgttgcattcaatgtatgcgatttatatttgcattttgaggaggaattactgcgtgaaagaattcaaaaatcaatataaagcgctaattgatgaaagcttacacacgattgatacaagcgatttaataaagaagtgtgaaggttttactgaagaagttataaaaaaagatattttgcccgaagatatcgttcaaatacataaagattatataaaaggtcaaaatttaagtgaagcacaaattttgaaaacctttaatgtgttaaaagaaattgttaaagggtttggttacagttatagagactataaacaattagtggacagattacagtatcacgataaagaaatagatttagcttcacgtctgcagcaaaccatgttaaaaacagatatacctcaatttgatagtatacaaatcggtgtcatttcagttgcagcgcaaaaagtaagcggtgattattttaacttaattgatcataaagatggcacgatgagtttcgctgttgcggatgtcattggcacaggtatcccagctgcattagctatgagtatgattaaatttggaatggattcatatggtcattcacaattaccaagtgatggtttaaaacgactgaaccgagttgttgaaaaaaatgtgaatcaaaatatgttcgtaacaatgttttatggcttatatgaagaattaaatcatttattatattgtagttctgcaggccatgaaccaggttatatttatcgagctgaaacagaaacatttgaggaaatgggagttcgaggaagagtacttggtgtgagtcaacaaacacgttataagcaacaagaaatacctatttatttagatgatttagttattatttttacagatggcgtaactgaagtcagaaatgaagcgggcgactttttagacaaacaacatttattagatatgattcataaatataaacatatgcaccctcaagatattgtgcaattattatatgaagccatattaaaaatacaaaacccagataaaagagatgatttaacgatattaatcattaaaagagtaaattagtttttagtgtttagatttaaaatttaaatttaagggtataaatgttattaatgagactataattaggagtgtaatgttatgaagcttaatattgagactgtaactcatgattcacattatgaggtgaaagttggcggtgaactggatgtatatacagttcctgaattagaagaagtcttagttccaatgagacaagagggaacacacgatatctatgtgaatttagaaaatgtgagttacatggattcaacaggattaggtttatttgtaggtacattaaaagcattaaaccaaaacgataaagaattatatatattaggtgtttcagatcgaataagtcgtctttttgatataactggattaaaagatttgatgcatgttaatgaaggaacggaggtcgaataacatgcaatttaaacaagattatatagaaatgcgtttaccagcatccgcagaatatgtaagtttaattcgtttgacattatccggtgtattttcaagagcaggtgcgtcatatgatgatatagaagatgctaaaattgctgtcagcgaagcagtgactaatgcagtgaaacacgcttataaagatgattacaatcaagtggggatgattaatctttgcttcgaaatcttcgatgataaaattaaaattattatttctgatcaaggtgatagtttcgattatgaagaaacaaaagcaaaattaggaccatataaagaaaatgaaaacatagacttccttagagaaggcggtttgggtctgtttttaattgaatctttaatggatgaggttacagttgataaacaatcaggtgtgacaatcagtatgataaagtatattaaaaaagagcaggtgcgaaataatggcgagagagtcgaaatcagttaatgatgtatcacctgaacaaataaaccaatggattatgcagcatcaaaacaatgaaaatacagatgcacaagatcaacttgtaagacattatagaaagttaatcgaatccttggcatataaatattctaaaggtcaatctcatcacgaagacctcgttcaggttggtatggttggtttaatcggtgcaatcaatcgatttgacttgtcctttgatagaaagtttgaagcctttttagtaccaactgtaattggtgagattaaacgctatttgcgtgataaaacatggagtgttcatgtacctagaagaatcaaagaaattggaccacgaattaagaaagttacagatgaattaacaaatgaactcgaacgttcaccttctattactgaaattgcagatcgattagaagtgaatgaagaagatgtgcttgaagcaatggaaatgggtcaaagctacaatgcgttgagcgtagatcattctattgaagcagataaagacggttcgactgtaactttactagatatcatgggtcaacaagatgataattatgatttaacagaaaaaaggatgatattggaaaaaatacttccaatactttcagaacgagaaagacaaattattcaatgtacttttattgaaggtttaagccaaaaagaaacaggagaacgaattggcttaagtcaaatgcatgtatcaagattgcagagaacagcgattaagaaattacaggaagcagcaaataaataaattgaatatatagacaaggcagatttcgaattttatggaatctgctttttaattgtattgatgattctgagagagtcatgtgatacagatatgttaaaatgtatttattaacaaaataatattacataatgataagcggaggatttcatggatagtaatttaattcaatcaatcagagataaatatagcttcacaaccaagcaaattaatgctgttttatctttattagaagataaaaatacagtaccctttatagctcgttatagaaaagagcaaacaggtggtttggatgaagtagaaattaaacaaattgatgatgaatatcaatatatggtaaatctacagaagagaaaagaagaagttattaataatatcgaagaacaaggcttattaacttcggatttgaaaagtgatattttaaaacaaaaaaaattacaaagagtagaagatttatacagaccgttcaaacagaaaaagaaaacaagagcaactgaggcaaaacgaaaaggattagagccatttgcgcaatggttacaacaaacaaatatagacacatctgttgaaacgaaagcacaacaatttattaacgatgaagtcacaagtgtagaagatgcaatcaaaggcgctcaagatatcattgcagaaattgtttcagataaacctatatatagaagtaaaatacttaaagatacatttcaacagggcaatattataacgcaaaagaaaaagcatgcagaagatgagaaagaaattttttctatgtattatgattataccgaaccgattaaaaaaatcgccaatcatcgagtgcttgcagttaatcgtggtgaaaaagaaaaggttttatcagttaaaatagaaatggatatacaagggatagaaaattttattagaagcaaagaaatatcatctgaacataatggtacctatgtcattatagatgctattaaagatagtttgaaaagattaatcatgccatcgatcgaaagagaaataagaagtgatttaactgaaaaagctgaaaatcatgcaatcgatgtatttagtgaaaatttgagaaacttgttattacaaccacctatgaaaggaaagcaaatacttggtgttgatcccgcttttagaacaggttgtaaacttgcagtcattaatccatttggtacatttgtagctaaaggagtcatgtatcctcatcctccagtaaataaaaaagaagatgctgaaaaaatatttgtggacttcgttaaaacatatgatgtcgaattaatagctatcggtaatggtacagcgagccgtgaaactgaacaatttgttgcttcaatgatacaagaacaccaattaaacgttcaatttatcattgttaatgaagcgggggcatctgtatactctgcatcggaagtggcaagaaatgaattcccagattttcaagttgaggagcgtagtgctgtttcgataggtagaagagtacaagatccattgagtgaattagtgaaaatagatccaaaatctatcggcgttggtcaatatcaacatgatgttaaccaaaagtcattagaaggtgcattgtcatttgttgttgaaactgcggttaaccaagtgggggttgatgtgaatactgcttcacgttcattactacaatatgtatcaggtttaacgcccacaattgcacaaaatattatagattatagagaagagaatggtgctataacgcataataaagaaattgctaaagttaaaagattaggtgcgaaaacatttgaacaaagtattggatttatgagaatcgtaggtggtaaagaacccttagacaatacttcgattcatccagaaagttataatgtagcaaatcaattattaactgaaattgaaatgactacacatgatttaggaatggaaaaacttaaacttgccttgaacaaaattgatattgtagcaatggcagaaaagttaaatattggtcaaccgacacttgaagatattattaactcattgattgcacctaatagagatccaagagatgaattcgaaactcctattttaaaatctgatgtactatctattgaagacttaactaaaaacatgaaacttagtgggactgtaaggaacgtggttgattttggtgcatttgtagatattggggtaaaacaagatggactcgtacacgtatcaaagcttgctaagaagtttgttaaaaacccaatggatattgtaagtgttggtgatattgtagatgtatggatattagatattgatgataaaaaaggtaaagtatcattaacaatgattgatccaaatggataacagtgcattacaaaaattaacagagacaatctcgttaaagtattttaaaatgccatttaaacataaagcatttttcaataagcgtttaagaacgactggtggtcgctatttattaagttcacacaatatagaagtgaatgaaaagcaatttgctaagtttggtgaatcagctatcattgatattattaagcacgaattatgtcattatcatttgcacttacagaagaaaggataccaacataaagataaagattttaaacgtctgtgccaacaaacaggtgcacctagattttgttctgcaattgaaaaatatgaagatcgagttaattatatatatcaatgtcaaaaatgtgcgtctagatttccaagaataagaaaagtcgatacaaataaaatggtttgtggaaaatgtaatggaaaactgaaagaattaaacaactaatatacttataaataatgaacgcctatcgataatttagtcgataggcgttcattatttatatatagaatgtattttatggaagatttttagcaatgattaaggaaaaaatagagtattttgtgtgtactttcaccaaattagaaagtttaattaattaatcttgttaatttactctttttagttttgtttattcattgacgatgagcgaaatatattatatgatattaaacgttgcgaaattaatagcaactttggttaaggaaacattaattttgttaaatacaatttaaaaagttgttgacaaatgattaagaatatattacaatgttatttgttacttaatgaacgagaaacaaattaaccgtttggctaagcggccgtggcggaacggcagacgcgctaggttgagggcctagtggga

SEQ ID NO: 50 - DNA, 69815 bp, Staphylococcus saprophyticus
tttacaaaggtaatagagataaaatctttcgaccagagtttatcatacataagaagaccgtcctttaattattttttcatacactatttattataatgattaacgtgtgctaatgtaaaattagtatttttaatatttatataagaaacgcttatgtaaaaaggggtgaagttatgaattttgaacaattagcttatgttaaaaaaatttatgaaacagaatccatcgttcatgcttcggaagcgatgcatattagtcaatctgcaatgagtcaatcgattgcaaatttagaagcagaacttggctataaactgtttgatcgatctcgaaaaggtacgttgccaactgaggtaggtaaaaaaataatccctttaatcattgatattttagaagcaaaaacacatttaatatcagaggttgatgccatgcattcaaatattgcaggctcacttaaaattgcgacgataccgacattatttaacaaaatcataccgaaagcattgtctacctttaaaaaggattatccacacattgaggttgaagtgattgaaagtgacagaaacaaaattatgaaaatggtagaggacaatgaggtggatattggcttgattgggaagactgaaagtgaaacatttgggcagaccatcgtctctaattcgcttaatatatctacaaatttcagattgattgtacctaaaaaatctaaattatcattacaagatacggttgaaatggaagctattcaacaatatccatttgtattatatgaccgcaatttttatcatcataattttaagcaatttgaagatgaaaatggtccgctgaaaattgtttttcgtacaaataatcctagcgttttgataaaaacagtatctgaagggttaggtgtcagtattgtttctagtttgatgcttgaagatgatccgtttattttaaatggtctcattgaaatgttacctattggtgcgccttttgactattatatttattttactgctatcactcatttagatagaacaaatgaacaaacgattcgaacgtttattgattatttaagaaagtgagtataaggcctaataaaaactgactttgtcgacagtttttgtgcacgctttccgcaggcaccaccttagcctgtaatcttcggttagcgttttttttcagaagtcgttcctaataacagcctttatgatatgaaaagcataatacgctacaaatttaaaggtattgatagttattttaagtaataacataaatatgacaatagacaaatccgacacatgaatagggtgttttgtctatatcaaaaaaggccctaatacaatgacatatcattgcatagggcatatttttggtttattgaatcttattcaaaaaatgatggaagtgcgataaatcggatatttgatggttacataatgtgctatcaaaacaaatgtagtcaccttttttggtatattggccatcattgccagtacgtgtttttcgcataaatagagcaacacgggattctttattgcaaatagagcagaaacctttgacagtttggttagaaatgtctccgtatacaccgtttaattttccaaagttatcataataaatgatgaattttctatttgaagcaatatcattccaaccgatatacgtacttgtttgtagtacttcatcactgataagaggtgtttttagctttttaacttttttaaaaaggttagtgacttgctttttactcggatgttcaaatggcttaacatacatttgtatggtcgttaaaattttttgagcttgttctttagttagttgtacattcatgagcttttcaacatttgaacgaattgtagtgtctctcgagttaaatgtattgagtatttcatcgcgtgtgacatctttgattgaagcgattgtattgggatcgttgaccgaattataagcattgactaaatgtgcaacgcgttcttttatataattaaattgataagggtaaagttgtttttccattttttattagttcctctcacataaatatagcttacatgcataagttagatgccttgtgataaggaattagattacaaagcatcgactacgttaatcgaacactttgtattaataatgtagcatttttgtgcaacatgtcatcatctccataaatatttaataattatcttataacagtctatcgtatatgtgtcaaatccgctttaataacataatattgaaatcgcaatcaattattgtgtgaactatatattttaaaacaaatgttctttcgatatatacaataaagcgtttttataatataatataggtgaaaataaggttattgtacacgagggaaatacattacagtttctgtaatatacaagggagatagaaatatgaaaaaaattatgattactggtgcattaggacaaattggaactgagttagttgtaaaatgtagaacattatatggaaatgacaatgtcttagctactgacattagagaacctgaagaaggctctgcactaaaaaatggcccatttgaaattttagatgtgacagacaaagtacgtatggatgaattagtcgaatcattcaaaccagacacaatgatgcatatggctgcattattatcagcaactgctgaaaaaaatccattatttgcgtgggacttaaatatgggtggtttaatgaatgcattagaagtagcacgtgaatataaattacaattctttacaccaagttctattggtgcttttggtccatcaacacctaaagttaatacaccccaagtaacgattcaacgtcctacatcaatgtatggtgtgaataaagttgctggagaattactatgccaatattactttgaaaaatttggtgtagatacacgcagcgttagattcccaggtttgatttcacatattaaagaaccaggtggcggtacgacagattatgctgtagatatttattttaaagcagttagagaagggcaatactcaagctttatcgcgaaagatacatttatggatatgatgtttatggaagatgccattaatgcgattatccaactaatggaagcagacggcgttaaattaattaatcgaaatgcttataatttaagtgcgatgagtattgaaccagaaatggttaaagaagcgattcaagaatattatccagactttaaattagactacgatgtagatccggttagacaatccatcgcagatagttggcctaatagtattgatgtaagttgtgcgagagcagaatggggcttcaatcctcaatatgacttaagtgcaatgactaaagtgatgctagatgctattgaaggcaaagagaaagcagaagtaaaataaagcatacattttttgaagctcggacatagtttgatatacagttgttaagcatttcactattttaggtgatgacattaacgaagtgtatgtcgactataggttcggcttcttttttgtttaaataacagcgattttaatacaaaatgcgagcaattaaaccataaattaatgtacggacagtggtttgattatccaagatacatattgttggtttatttgaaattttttgaaaattattgaacacagactagtggattggtataatttaatataatacttaagaataaacattgggaggaagcagtcatgtcagaaaaaattaaatttgtacaacgtgaaacacttaaagaaaaaccgaatccaagtgaattaggttttgggaaatacttcactgattatatgttgagtttcgactatgatatcgatcaaggatggcatgatttaaaaattgtaccttatggtccaatagaaatttctccagcagcacaaggtattcattatggtcaatctgtatttgaaggtttaaaagcttataaacataatggagaagttgatttattccgtccatcagagaacttcaagcgtattaataaatcgttggcacgcttggatatgccacaagtcgacgaagaagcggtattagaaggcttgaaacaactcgtagatgttgaacgtgattgggtaccagaaggtgaaggacaatcattatatattcgtccatatgtttttgcgacagaaggtattttaggcgtacgtccttcatactcttataaattattaattatattatctccatcgggttcatattatggtggcgcatcactcaatccaactaaaatctatgtcgaagatcaatatgtccgtgccgtacgcggtggcgtaggttatgccaaagttgcaggtaactatgcggcaagcttattagcgcaatctaacgcgtcagctcaaggttatgatcaagtactttggttagatggtgttgaacaaaaatatgttgaagaagtcggaagtatgaatatcttcttcgttgaaaatggtaaattggtaacacctgaattaaatggtagtattttacctggtatcacacgtaagacagtgattgagttagctcaaaacttaggctatgaagtggaagaacgcaaagtatctatcgatgaattgattgaagcgcacaataagggcgaattaacagaagtattcggtacaggtacagcagcagtcatttctccagtaggtcaattaaaatacggtgagacagaaatcgtaattaataataatgaaactggtgaaatcacacaaaacttatatgatcattatactggtattcaaagtggtaaacttgatgatccacaaggatggagagtcgtagtaccaagatattaaaattgatcctaaaaaggttggtaacgcgcatgcgttaccaaccttttttatgatgatatctatttgaatgacggccgctaatcgatattaattttttgaaatgtcattcgctacatcttcgttgatgccttctttaaaattttgtatgaatacatcgagactatcaaaaaagctaacagcaaataaggataaaataatgacggcaatgcctttataccaacttgacggtgacatcggtttgtcccttttcgaaaaataaataacgattaaaatgctaacgataataaaagtaattgcataaatcatgatacgcttacccctttattaatcgaatgaaaataattgtagctggttacttttgtgtgttttctctgttttcagcttgctttacgccattttctccaccttgcttaatgtcatctacatgatagaatccattgacaatgacaatgaccatggcaaatgcaatgacaccgatgcctttaaaccaacttgatggtgacatgggttcatctctttttgaaaaatagataccaatacatactgcaataattacaaatactataaagtaacccattttaaaaaccccccttgtagtatttaaatgtttttgcacaatttatattttttgacattatgataacataatacgtatagaacgcaaattaagttaagtatcagatacatgcaattaaatcaaattcagttacaatatttgtttcgtgtgacatttttgtactaaaatataaagcgtgaattattttaattaagcgaaattataggagctgttcaagcatgaaatggattttatttgataaagatggcacgattatatattttgatcgtagttggatgaagattgggctacaattagtagatgattttatggaaaagtatgatcaagatattgatgataagtcagcagcatatgcacatttaggtgtggttgacggtgaaatacagccgggtacaatcatggcttcaggtgcactggatgaaatggtgcaagcgttttgtgatattgctggtcaagatgtcacaaaatgggcacaagcgcgcagtcaaactttagtagataatagggtgcctgaaaatgtattggttgaaggtatcgaggatacgttaaaaacattacagaatcaaggatataaaatgggcattgttacaagtgattcgaaaaagggtgtcgagcaatttttagagattactcaatttaatcacttttttgatgttattatttcaaccgaagcgaatgcagtcgaaaagccaaatccagaagtattaaatccattatttaatcaatatgatgttgctcctgaagacgtcgctatcgttggtgatacagcaaatgatatgcaaacgggtgttaatgcacagctcggattaaaagttgcggtgttaactggtgtaggattagcagaggaatttacccaagcggattatactgtagaaacagcaaatgatatcgtaaaaatattaaaaaaataggcgcagtgtctaaaatatgtcataatatgcttaacgtatattatgacttttttaatatttaattttaaatattgaggtgatcaaaatgattgatgggaagtatgcagattatcatggcgagacgtttaaaattgtggaaatgataagtaatgacgtggtgttggtcactgaagatgaacgagcgttagatatagggtttgaagctaaaacaataaaacattctaaacatacattatattttaaacaagtagcacgtgatgatatcgatgagctttacgcattatatcaagaagcgcgatatggtggtgcaatctttgatttgtatcaagatacggaaggtcaactatatatcggaacagaagaccaagataaggcaagtacctttggtttagcgcaaacggatgaacattattacagtaaatatgtgacagacgatgaaattgaaaaaattatttaccgtagccatattgagtaatttactgttatacgcataaaaagtcactccgaccaaaacctagtggagtgactttcttttaatatattgaatttaacgttgatcgactttacgatatgtttcgatgacgttgcgaattttgtcaataactgggttgagtgtttcaggatcttcgtgcagatcatattcattaatattgactcgaacaactggacaagcattaaactcgctaatccaatcttcataacgttgatataatttttgccagtatgcggtatccgtttcaatttccatttgacggccacgttgtttaatacgattgatgacatcgtcataatcgcactctaaataaattaatacatctggtttagggaagtaaggtgtcatgaccattgcgttaaacaattcagaataagtttcaaagtcttcaggactcatcgtaccttgttcttgatgcattttcgcaaaaatatcgacatcttcataaatagaacggtcttgaataaaaccgccaccatattcaaacattcgtttttgttctttgaaacgttctgctaaaaaataaatttgtaaatgaaaactccaacgctcaaaatcattataaaacttatccagataagggttgtggtctacgttttcaaatgaagttctaaaattaaagcgctctgctaaagcttttgttaatgttgatttaccaacgcctacagttccggcgatagtaatgacagcatcttgcgggataccgtaattattcatgctcatgtcctccaatcagtggcttcactaattctaaaatataattataatcgttctcatacttcataaaatcaaggtgtgtcgtatcaatacgtatgacgcgttcaccatcgttctttaaagattcgtaatagtcattgtaatcacgttttaaatttaataaataatcatctgcaatttgatgttcaaagctccgattacggtgcgcaatacgtgattttagtgtagccaaatcagcgtctaaaaagataatcatattaggcatttctaaatcttcggttaaaatatcatagattcttgaaaatttattgtattccgtcgtagttaaggtattatttgcaaaaattttatttttataaatatggtaatcactgacaataccgttttcaattaatgcgagatcttgaaattgtttatatcgattacataaaaagaacatttctgtttgaaagctccatttggaaatatcttcataaaaatctgataaaaatggattttctgtgataatttctttttcttcataatatttataagtttgactaagtttatgtgctaaagaagattttccgacaccaatcggaccttccacagcaataaattgttttttcatatttaccgctccaatgttaaaatagacaataaatattgtaccatatgtgaggtgtgtgagatacatgacaaatcatgaattttatatggaagttgcgattgaagaagcaaaaaaagctggcaatataggtgaagtacctatcggtgcaattattgtaaaaaatgatgaaattattgctagagcgcataatttacgtgaatctgaacaaaatccaactgcacatgctgaacatattgcgattcaacgcgctgcagctgctttaggaagttggagactagaaggctgtactctttatgtaactttagaaccgtgcgtgatgtgtgcggggagtatagtgatgagtcgtattccttctgtgatatatggagctaaggaccccaaaggtgggtgtgccggcagtctaatgaatctgttgcaagaaccaagatttaatcatcgggcaacagtagaatttggcattttagaagaatcttgtagtcagttattaactgcgttttttaaaaatataagaaaaaataaaaaaatcattcgaacagccgataatacaaaaaagtaaacatttgatagaatatgaatatgttacaaaattatgacaaatgagaatcatatataattgattttgtgttatcgatcttagaagagaaagaggtaaacaaatgataaatttaattgctacagatatggatgggacgttactaaatgctgcacatgaaatatcggaagaaaatataaaagctataaagtatgcacaatcccaaggtattacagttgttatagcaacagggcgtgctttttatgaggcgaattctccggtaaatcaaacagatttaaaactaccttatatttgcttgaatggtgccgaagttagagatgaatcatttaatattatgagtacatccaatttaaatcgtgaattgaataatcgaattacaaatgagttaaagtcagaagatatatattatcaagtatatacaaatttaggtatttatactgaaaatcctcaacgagacttagaaatctatatcgatattgcagaacgtgcaggtcaaaaagcggatgttgaaaagattaaagcaggtattcaaaagcgtattgataatggcacattaaaagttgtagataattatgacaaaattgaggatacaccgggtgaaattgtgatgaaaatattggcatttgatagtgatttagcaaagattgatcgtgtgagtgaaaaattagcacaatcagaaagtcttgccatctcatcctcatctagaggtaatattgaaatcacacattcagatgctcaaaagggcattgcattggaaacaattgctgagcgattaaatattgatatggaaaacgtaatggccattggagataacatgaatgatatttctatgttagagcgagtaggttattcggtatctatggcaaatgcagcaccagaagtaaaagcagtcgcgacgtacacaacggattcaaatgaagaaagtggtgtcggtaaagcgattatgaaactacttcaagaaaataacaaaaaatagtatgaggtgaagtaataaatgaaaggtttaattatagttggtagtgctaaagtggggtcacatacaacagcactatctcaatatttgaaaggtcattttgaagaacatgactttgatgttgaaatttttgatttggcggagcaacctatccaccaacttgatgtttctggagcatctaatccaagtgaaagttataaaaataatttacaaacattgaaaactaaagcaagagaagctgattttttcgtactaggtagtcccaattaccacggttcttactcaggtattttaaaaaatgctttagaccatttaacaatggatgattttaaaatgaaaccagtagggttaataggtaatagtggtggtattgtcagttctgaaccattgtcacatttacgtttaattgtacgttcgctattaggtattgcagtacctacacaaattgctacacatgatacggattttaaaaaattagacgatggtacatattatttagctaatgaagaatttcaattacgtgcgcgtttatttgtagatcaaattatttcatttgtaaaaaacagtccatatgaacatttaaaataagtcagttcaataagcaacaaagaagcgcttataggttatctatcagatataggtaatctataggcgcttttgattaactgtttatttttaagatattagaaacaatcgaatgatactgtcgtataattttagtgattttgtcaaaatcaatactatgtaaatagatgcgtcgttcatcatgttcatcgcgtgattttgtaaataaaccgaagttactcaggttatttatttgaatcgaaatcggtgtattgtcaatgttcaaatgtcttttaagttcgaccgcatcaattttttctttgtttaggtatttcaattgttctaaaataataatttctaaaaatgttaaacctaaatctttcttgattgccttttttatgatgtttctgtttttttcatataaaattgtattcatatctaacctctcatttctttttaaatccgctaatgaatgtatagagtcataacgcatttgctttcataagtaattttaggaaaatggattagttttcctagaaaaggagatgccatgtttggtcataatccattttattattatcaacaatttgtatgattaaattgagatagaaatactgccataataattttaatatggaaattgtctatagaacatcagcgaaatttaattattaatatctattgttttaatattaatatattattgcaaaatttagggtgtaaattttaacataacatattaaaattttactttgataaaaattgagatgaatttagaatgaaaataaattaaatgaaaaatgacaaaaaagcatatgcgcaaccgaatcaagagggttacacatatgctaagtcataatgattattttctatattttaattttgcgaatgcatcgtgttgatgaatagattcttcattacggcattcaatatcgaagccatcgagccaatcaaaatcgactaaatctgctgcgattaagcgaatgaggtcttcaacaaatctaggattttcatatgcacgttccgttacgctcttttcatccggtcttttcaagatagggtataatatagagcttgcattggcttccatggcatctaaaatcacatctttgtaattatcaatcagctcaatgtctttattaatgtatgccttcacagttacaataccacgttgattgtgtgcagaatattcactgatttccttagagcaaggacatagtgtcgttaccgctgcttcaatcgtaatttctttacgtgtcacattttgtttatcaattgctaaaccataagtgacgtccgcatgtccaactgctttaatttgtgttattgggctaaaacggtcaaaaaaccattttgctgatacgtctaatcctgcagcattttgattcatacgttcttgtaggctgcgtaataattggtatagtgcatcaaaatctaattcaataccgttatggtaatgtttttcaacactttctaaaatacggctcatgttaatccctttttcgtctaggtttaaactagttgaaaagctaaaattaccagcagtctggaaacgatcaacaagtactggataaaccagattcttaataccgacttcttctatttcaaataagaagtttttatgggtgctttgtaaatctttcatttcttcttttattgttggtttcgtaccttctattgggtcgacggatccaaaatgtttccaacgaccttcacgtgtagataagtcaaattctgtcatgctattgcctccacttaagattcaaagttataagtccaataaggttctacttctaagaaactttgtgcttctccagatacttcaggtgtggctaattgttttaaaaaaggacctgtctgagatgaatgggcttcaaatgcgcgaagttttacctctttataatcactgatctcatttagtatatcaggggcacctagtttttctggtgcatcattactaaatgctacgagttgtaaacgtggtctttcagatgctggcatgcgaccaactgttctaacgacagcctctgcagtcgcttcatggtctgggtgcacagcaaattgcgggtagaatgagatgataacagatgggtgtaattcatcgattagcgattgaaccattgcgtccatctcatcatggggttcgaattccaccgttttatctcttaatcccattttacgcaagtcagttatgcctatggcttccattgcgttttctaattctttttcacgaatatccggaagtgtttcgcgtgttgcaaaaggcggattacctaaattacggcccatttgacctaatgttaaacatgcatacgtaaccggtacgccatgatcaatatatcgtgctaatgtgcctgcagatgagaatgactcatcatctggatgcggaaaaatgactaatacttggctttcctctgacatgatatgccctccttacgctttaaatggtgttgtactgatttctaaggcagcggctaattgtccttcataattaaatccagctaatagaaattcatcattttcattgacttcgaaatgcgttaatccttgtacataaacccaaccattatcttttagtttgagtccaacacgataagggtctttgttaccacctttgagttgcgcatgttcataagtaacttgaatatttcttaaaaaagtaccggcattaaatacgcgttggtcgaagtgggcagcatatgcaccatttgtcgtttcaacgtgaaggtatacaggtttatgctcatatgatgaaagtaaagtttgtactttgtcataatcgatctcttccaaattcattgcctccttgctttcagaacctaattttacaaaattcatttattgaaatcatttttcggtatcgtattcattaataaatcagtccatatcttagtgtaaaccgacttttatacattttctacctgaaaagtaaattttatagataagattgtatttttgattatctttccattctactaaaaagtacatcataaatgtatctctatgctcaataaatcgtaagtattttataattttttgttaagtatgatgtaggaattcgatttctgtcaaaaataagataatcacgtataataagtaagtgtaagtatatgtaagtatatgtaagtatatggatagattagagtcgttttgtatttatttacggggagggcacgtatatgaaaataacaaatcttggtacaagcggatatgcttcattttatgtggcgtgtgaattatataaacaaatgagccaacaaaatcatagtaaattaggactagctacaggtggcacgatggtagacgtatatcgctttttggtgcaattattaagaaaaaacaaattagatgttagtgaaattgaaacgtttaatttggatgaatacgtcggactcgatgcacagcatgagcaaagttaccatagttatatgaatgagatgctatttaaacaatatccttattttaatccatcattacttcatataccaaacgggaatgccgacaatttaaacgatgaaacgaaacgctatgaacaattgattaatcaaaaaggtccagtagatattcaaattctaggtattggtgaaaatggtcatattggttttaatgaaccaggcacagatattaatagcgcaacgcatatcgttgatttaacagaaagtacaattagtgcaaatagtcgttatttcgataacgaagtagatgtgcccaaacaagcagtttctatgggcttatctaccatattaaaagcgcatagaattattttattagcttttggtgagaaaaaaagagctgctattgaaaaattagcagaaaatgaagtgaacagcgatgtgcctgctacgatattacatgcacatccaaatgtagaaatatatgttgatgacgaagcggcacctcgattatagaaattcgttttaaattttatgaaacgggtagacattttaggtaaatgattttaatgagtaatcagtaagtttagccatgttatggctttgataatttaattcaagaagggatgatcattttggaattacaactagcaattgatttattaaataaagaagaagcggcagagcttgcaaataaagtaaaagattatgtagatatcgtagaaattggtacacctattgtgattaacgaaggtttaccagcagtacaatatctaaacgataatattgatggcgtaaaagtcttagcagatttaaaaattatggatgcagcagattatgaagtaagccaagcagttaaatttggtgctgatgtagtaacaatcttaggtgttgctgaagatgcatctatcaaaggtgcagttgaagaggcgcataaaaatggcaaagagctattagtggatatgattgcagtacaagatttacaaaaacgtgctaaagaattagatgaattaggtgcagattatattgctgtacacactggctatgatttacaagctgaaggtgaatcaccattagaaagcttacgccaagttaaatcagttattaataattctaaggtagctgttatcggtggtatcaaaccagatacaattaaagaggttgtagcagaagaaccagatttagttgtcgtaggtggcggtattgctaatgcagatgatccagtagcagctgcaaaagcatgtaaagatgcgattgaaggcagataatatgactgaaattacaaattatcgcttaattttagatgaattagaccatacactatcacatgtgagagataatgaggcggaagcttttttagcacaagtagtcaaagcgaaccaagtctttgtagctggtaaaggtcgctctggatttgtagcgaatagttttgctatgcgtttaaatcaattaggcaaatatgcgcatgtggtcggagagtcaacaacaccatcgattacgaaagatgatttatttgttgttatttctggctctggttctacagagcacttgcgtatcttaactgaaaaggctaaaagtgttggagctgaagttgtattactaacgacaagtcctaattcagcgattggtaaacttgcaaatgcagtgattgagttaccagctggcacgaaatatgatgctgagggatcaacgcaacctttaggtagtctttttgaacaggcatcacagatattattagatagtattgttttagatttaatgtctgaactgaacgtggatgaagaaacaatgcaacaaaatcacgctaatttagaataattgagtagcgattaaaaatttaagcagtgttgcttagattttcgagagtcgacaaagttataaatgctttgtcgactttttttatgctcaggtttaaacaatttttaattactattttgtatttaatcgttttgcaagttagtgacacaaatgcaacggtttagagtggttattttaggttgattaccaaaatgggatgactccccataattaatgaaatgtaattcgaatattgacttatcattacccaaatgaacgcttaattgaggtgaaaatggaaaatataagttcatatttaccacaaggaaagattcatgctatttagcagttttaatgttaacatatttgttatgaaggttaacaaacagtgggggaatcatagtggaattattaaagaaaatggatgattatgcgaaaaaacaacccaatcaatatgctttagactttggacgagataaacaaacgtatgcagggttagtacaaaatatgaaatggtataaacaacagtttcagcatataccacaatatagttatgtggggttactaattgaagatcctttaaccaccatagaattatatttaaccatgcttcatcatcaatgtattccttgtatattggactatcgttggtcagaagaacagattaaaacactgatagatcattatggcatcccatttttaataaatagtgaattagaagtgataaaaatgcaaaatgaacagggacaactcaagtggcacgaagatgtattacatattggctttacttctggaacgacaggtttgcctaaagcttattatagaaatgaattatcttggatatattcttatgaagaaacagaaaaattaatgaaaactgaaatagatactatgattgcacctggccccttgtcacattcattatctttatttgtgtgtgtctttgcgctatacacaggacgaacgtttattggacaacagcaatttgatgctcagacattagcggacatgatgcaaaataatcatacaatccatcattgtgctttgtttgtagttccaacaatgttagatgcctatgtatctggacaattggaaatacaacaaattaaatatattttttctactggtgataaattaccttatagtttgagaaatcgtgttgctacgcattttcctaatgcaacgttaatagaattctttggaacatcggaagcaagttttataagttataactatgataatgaagcccctagccattcggcgggtaagctatttccaaatgtgaaaattgatcttgagcagcctgacgacaaaggtattggtaaattaaaagttaagagtaacatggtctttagtggatatgttgatgatgcacatcaaagtgattgttggataggcataggtgattttgcatctatggatgcccataactatctatatttacacggtcgtgagcatgaccgcatgattattggtgggagaaatgtttatccaatagaggttgaacgtgctgtacaagatttcgaaagttttcatgaggttttagtgattagtgcaccgcatacaaaatttggagaaattgctgttttattatatacaggcacagaacacgtgacttacagcggactaagagcatttttatcgaagcgattagcgagatatcaaataccttccaaactgttaaaaatagaaaaaatggaacatacccaaagtgggaaaattgcacgtgaaactatgaaacagcgttatatgaaaggagcactttaaactatgacagaagttgttattgtggctgcgaaacgtacggcatttggtaaatatggcggttcattaaaacatttggaacctgaagcattattaaaaccattatttcgtcatttaactgaaacctattcagaagcgatggctcatattgatgatgtaatccttggaaatgtagtaggtaatggtggaaatattgctagaaaagctttgcttgaagcagggttaagtgaacatataccaggtttaacgatagatagacagtgtggttcaggattagaagcggtcattcatgcatgtagaatgatacaagcgggtgcaggtcatatttatattgcaggtggtgtagaaagtacgagtagagcaccatggaaaattaaaaggccacaatcggtttatgatacacatttaccggaattctttgaacgtgcttcgtttgcaccagatggacaagacccatcaatgattgaagcagcagaaaatgttgctaaaacctatggaattacaagagaagaacaagatcaatacgctttaaatagtcataaaaaaacaatagaagcctatgaaaacaatatcgttcaacaagaaattataaatttaagtgctaaaggtgaaatatttaatagagatgatagcatcaaagaaagattaaacgtacgcacattaagtcgcttaaaccctttattgtcagaggggacagttactgctggaaattgttgtatgaaaaatgatggggcagtattacttatgattatggataaaaaaactgctttagcacataaatttaaggaaggcttaatatttaaagatagcattacaataggtgtagaaccgacattgctgggtatgggtccagtacctgcagtttctaagttacttcgcaaaaacaagatgacgatagaagacatcaacgcaatagaattaaatgaagcattcgcgtctcaagtagtagccagtcaaagatgtttggatattccagcacataagttgaacaaatatggtggtgctattgctactggtcatccgtatggtgcaagtggggctgcacttgtaactcgcttatttcacatgaaaaatgataaacgtactattgcaacaatgggtattggaggaggaatgggcaatgcagccttatttgaaagatggttatgagacaaaagtaatcatatttaatgctgaagcagtacggcaatataatgcgttttttaatatttcggaagaagatgtcgttcaaccactttattgcgccaagttatggcccgaatttacgttatttcaaccgtttcaaaaaaaggaaatcaaacttagagaaacccaagttactcaaatacacgatataaaggtgaatatacactatttagcacaaatgtgcgtgatagagcagaaaaaggtacgccaatttatgaaatatgtcttggaattgcaaatttataaaaataagtctaaatgtataactatcagacaaacgtttatggagaaattttaaaatgttaagtataaacgctaaagaaataaacacctatttaaaattaatcaatgaccaaaatccgattcatgcacatattgtacctggacaaatgattgtgcaaatggcacttcaaagtcaacgattacagtggacatcatatcgcgttaaatacatcgaaactgttggtataaatgagttgatacaattccaaatggtttccgaaagtatcgtagttattttaaatcaacatgatgaaaccctaattaaaataattaaagtttaaaaaaataatccattaattttacttttatttatttgtaaaaatcaaatgcatatgatgaatttttgcaatcatcaatatacattttttgtataaaaatgatttagaaatcctttgtaaaacttaattcaatttgacaatattaattaactacgtataattatatcacatgttaagggagtggacacattcatggattatgaaaaggattttgataaaagtaatataaataaggttgatcctaaagcagctaaaaaaactgtgtttgccacaggtatcggaaacgcgatggaatggtttgactttggtttgtattcttatttagcggtcatactagggcaaaattttttcagttcggttgaaaatgatcaactcaagactatttttacatttgcgacatttgcgattgcatttttacttagacccgttggtggtattatcttcggtattattggagataaatatggtcggaaagtcgtattaacgacaactattattatgatggcgttctcaacgttaatcattggattattacctacatacgatcaaattggcgtttgggcaccgatattactcttactaggtagggtattacaaggtttctcaactggtggagagtacgcaggtgctatggtttatgtagcagaatcatcaccagatagaaaacgaaatacattaggttgtggcttagaaatcggtacattatccggttatattgcagcgtctgttttaagtggactattattcttcttcttaagtgatgaccaaatggcaacatggggttggagaattccatttatcttaggtttattcttaggtatatttggtttttatttaagaagaaaattagaagagtcacctgtttatgaaaatgaacttgcatcgaaaccgaagagagataatattggtttcttaacaattgtcagatactactataaagatatcattgtttgttttgtggcagttgcgttctttaactgtacaaactatatgttaacttcatatatgccatcatatttacaagaaattgtgaaattagatagtacaacagtatccgtattaattactgtagtcatggcagtgatgattccattagcattaatgtttggacgcgttgcagatagaatcggtgagaagaaagtattcttaattggtcttatcggtacagctgtattgagtattggtgcctttgcattaattcaaacaacaacaattatctttgtaatcgttggtatcttcgttttaggtttcttcttatcaacttacgaagcaacgatgccaggttctttacctacaatgttctatacacatataagatatagaacactagcagtaacatttaatgtatctgtatcactatttggtggtacaacaccattaattgcatcatcacttgtagcgaagacaggagatccattatctccagcatattatctaacagcagtaagtattgttggtattatcgttatctcattattacatgtaagtacctctggtaaatcacttaaaggttcttatcctaatgttgaaagtgatgaagagtacgagtattatgccaataatcctgataaagcaatgtggtgggcaaaagacaaacgtgtttaattaaataaatatttttaaattaaaaaattgaattttaagctgtcatcaagtttagcgactttatggcagcttttttgtataaatgccgcttgagtcaatatttttaaatcaaagtgatgatagtattgttcttaaattaaaaaaatatcaaaataacaattgacactagaaaaaaacagtgtattattatcgttagatatctaattaaatgaggtgcttgtttggaacagtcatatggatatttatttagaatgataagccatgagatgaaacacaaggcagatcagcgtttgaaaatgtatgatattacaaacgaacaaggtcacgcgctaggttacttgtatgcacaccaagcggatggacttacacagaacgacattgtgaatgccttacaacgtaaaggttcaacagtaagtaatttacttaagaacttagaaagtaagaagctcatataccgttatgtagacgcggatgatactaggcgaaaaaatttaggtctaactgcatcaggtaggaaattagttgaagggtttacaggtgtatttgacgagattgaagcactcgtgtgtgcgcagttatcagaagcagagaatgaaacaatgaaacaaaatctatctaaaatgcttagcagtttagaagattagttactataagtggctgttataaattgaaaaattaacagccaccatatttttgaatatatagttagatatctaattattaggtgtctaaataaaaagaagtaatatagaaatgaaagacgaacagttatattattttgaaaaatcttcagtatttaaagcgatgatgcatttttcagttcctatgatgataggaagtttattaagtgtaatttatggtattttaaacatttattttattggatttttaggtgatagtcacatgatatcagccatttcactcactttacctatatttgcagtgttaatgtgtttaggtaatttatttggtatcggtggaggaacttatatttcccggttattaggtgcgaaagattatgtgaaaacgaaatttgtgagtagtttttctatttatggcggccttatattaggtgttattgttattttaatgactattttcgctactgaacaaattgttcatttattaggtgcacgtggtgaaacacttggttttacaagtgcatatttaaaagtaatgttcctaagcgcaccatttgtcatattgttctttatcttagaacaattcgctcgatccattggtgcaccaattatctcaatgattggtatgctggctagtgtggttttgaatatcattttagatcctattttaatatttggttttgatttaaatgtagtaggtgctgctttaggtacagctatttcaaacgttgttgcgtcgctattttttatcatttattttttgagaaaaagcgacataattacaatgagtttgaactatgtaagaccgacgaaagaaatattagtagaaatttttaaagtaggctttcaagcatttctaatgggtattttaatgggcgttacaggattagttttaaatttatttttagctggctatggtaactttgccattgcgagttatggtatttaatttagattagtacagtttcctgaattgattattatggggctatgtgaaggtgtagtgccattaattgcttacaattttatgtctgataaagcacgtatgaaaaatattattaaagtcgtaattatgacaatcgttgtgatttttgcagtgtgcatggtcattgtgtttactacaggtcatcaattgataggtattttctctaatgatgcaatggcgacatttatgttgaaagtaacaatgacctcattattattaaatggcattggtttcttatttactggtatgttgcaagcgactggtcaaggacgtggtgcaacgattatggctattttacaaggtgtagtcattatcccagttctatttgtaatgaatggattattcggtttaactggcatcgtatggtcattattaattgcagaaacaatttgtgctttggctgcgatgctcattgtttacttattacgagatagattgacagtagataaagcagaattattagaaggttaatctttctaatttaatataataatacaaaaatctttgtgcattcaaaatgtctgcgcgaagattttttcgttttgtgttatttttaaatagtaacgaactatttataaatatgggggattttatatggctttgacagtagagcagtattggcgcaaatttattgaagcatttccaaaatacaaaggtgtacaatttgaagcatggtcttttggtgttgatgaagatgaattagctaatttagtaaaacaaggtgaaaaaacagcaacaactagtggttatgagacctacaaagtagaaggtgaaccgctaccggaagcaggagatgtcagtgttgtattaaatgagaaaggtcatccacaatgtgtgattgagacgacacgtgtataccaaacgccgttcaataaggtgacggaacatcatgctttcttggaaggtgaaggagataaatcgttaacatattggcgtgaagcgcacatagcattctttaaaccgtattatgaatcattagaaatcgattttaatgaaacttcaatgatggtttgtgaagagttcaaggtactgtatgtataaaaagagtggtacatcagttagaactgcttcgaggtagctctccaagcaaacaaaggggacaatctttgtctaactgtgtaccacttagggtgtgtgtttatagggatgtgttattcaaagtatgtttaaggggacaacttagacatactttttttaatttcatatttcttaataaggggagttaattgtatatcgtttcttctaatttcaatttattgcatcttctgtgttgtcttcgatgagtcgaaaataacttaataacttaatttcatgttatcaacatcattttctagtagagagagtaacttatataattcattcgtgttgaagctttcatcgaacttaacagaaatcgttttgaaagtcttggtgataatttcatatattgggttaccattttcaaaagcctgtttgtagataatcatgttgagtttccctccttcatctctctacactacatataataatagaatttcatgcgaaatacatgagtctacagtatcaactttttatcagtctaacgtcgtataacatcagaaaggctgatgtaaagcgttttctgatgatttgttagacaattacaaaagttaggttacctaataatcaaaataataaatcgtatatttagtttaaatttgcacttttggtaatatttctgtaacattgtaatcgaatcgtaatctgattcaaaaaatctttaaatggagtgataccaaatgaataagatagcaaagacttttgtagctggtagcattgtatttgggactgcattaggcataagcgtttctaatgaaggtgtatcacaaaccgaagcacaagcagcaacgacacaaccttggtatgagtatagtggttatacttcaaaaggtggggattttgtactagatcaatcattttataatggtttaaaagcaggtaatgttgaatttaatggtattaaagttaatagtcaatatacttctgatacagcgactaaaacaatatatgatcaaacattccaacaaattaatggaaataaagcgaatagtgtaacttttgatatacaaaataaagcagtaagttttaaagatatacgtgtgcaatatggtcaaaattatgaatatcaagaacccatgaatggtgagaaaaaagcaagtggcgatggcttatacggatatgatgtaagcaaaggtcatattgtattttatgtaagtaatggttacgtgaaaagtgcaacgctctcataacccataaatagaattattgaatagacaatagaatctgaaacataaaagcccgtcgttaacattacaagttaacgacgggctttttaaattgtttaaacttctgtcacttctacgtctacgtgttcaacacgattataggcaccgtggtctactggaccgacaaagtcattcattttccaaccgtttttaattgcagaagcaacaaatgctttagctgcgataacggcttctttcggtgatttgccatttgctaaataagctgtagtagcggcagcaaatgtacaaccagcaccgtgattataactttgctggaacatgtctgttgttaattgatagaatttttgaccatcatagtataagtcataagatttatcttgatctaatgctttgccacctttaataataacgtgcttagcaccttgctcatgaattacttcagcagcttttttcatatcttcaattgattttaatgttcctaaattagcgagttgaccagcttcaaataaatttggtgtgaccactgtcgcttttggtagtaagtattcaatcatagcgtccgtatttcctgggttaagtacttcattttcccctttacataccatgactgggtctacgacaaaataatctgcaccagattcaacataggcgtcgccagcacgtttaatgatttcttgtgtacctagcatacctgttttaacagcatctggaccaatggaaatcgccgtttctaattgtttttcgaatacatcaaatggaatcggtgttacatcatgtgaccatgattttttatccatcgtgacgattgaagttagggctacaataccgtatgtgcctagctcttggaaagtttttaagtcggcttgcatgccagcaccggcacttgtatctgaaccggcaattgttaatgtttttttcaatgccatggaatttcactcctaaatatcttttgcatatatcataccacgtttgtcgagtattctaaataaaggaagtttgtagtgaagttaaatttatcactattgaaaaaggatattattatagaagtagttggactaatcatcgtgatgtcgagaaagtaacgaataagggaatacctgagctaaagctcaaacggtctaggaacatatgaactaaagttcatacgtaagtggtactaaacttgcttaaagcaagaagttccactaataattattgcgaagcaaaaaagtttttaagggttacattcactaaagtgaatgcatttgtataaaggaacacatttgcataaacaaatgcgtaagtccaactattatagaagtagttggactaatcatcacgatgtcgagaaagtaacgaataagggaatacctgagctaaagctcaaacggtctaggaatatatgaactaaagttcatacgtaagtggtactaaacttgcttaaagcaagaagttccactaataattattgtgaagcaaaaaagtagttctttatgttattatatcaatgaggtgagaggtatatggaatggtcggatgtttttcatgaaataactacgcgacatgattttgctgcaatgcatgattttttagaaaaagagtatactacagaaattgtttatccagatagaaaaaatatttatcaagcctttgatctaacgccatttgaacaagtgaaggtggttatattagggcaagacccttatcatggaccgaaccaggcacatggtttagcattttctgtgcaaccagatgcgaaatttccgccctctttacgaaatatgtataaagaactgcaagatgatgtgggatgtataagaaaatcgccgcatttgcaagattgggcacgcgagggtgtattattattaaatgctgtgttgacagtacggcaaggtgaagcacattcacataaaaatattgggtgggaaacgtttaccgatgaagtaatacaagcggtatcagaacatttaacacacgttgtgtttatattatggggaaaacccgcacaacaaaaaattaaattaatcgatacatcgaaacaccatattatacaatcaccacatccaagtccattgtcagcgtatagaggattctttggttctaagccttattcgcaagcaaatacatatctacaagccaatggtaaacaacctgtgaattggtgcgagagtgaggtttaaaaatggaaaaagataaaattatacaattaattgaacaagaattagtacaagcagatgaagcaaatagtaacgcagaatttgaaaaacatatttatgcgattcatacgttaacgtcattagtgagtgacaattcatctagtaagaaagtatatagtgacaacagttttaatgtgtcttcttcttttaaagcgtctaagtcacagaatatctcatctaagcagggtgtttctgaagatgagattcacgcaatgggtggaaaagtatcaggtgtttcttcatctaatacaagcacaaatccatcactcactgcgaataaattagtaacagatgatgaaataggcaatggcgattccatttttgatttttaaataattttaaatagtaaaggatatgaatagatcatgatgaaagtgtttattattttaggcgcattaaatgcaatgatggctgtaggtaccggtgcgtttggtgcacatggattagaaaataagctatctgcaaaatatttatcagtatgggaaaaagcaacaacttatcaaatgtatcatgggcttggattactagccataggtattattagtggtacaacttcgatcaatgtaaattgggcgggttggttacttttctttggaattgtatttttcagtggttctttatatatcttagcgttaacacaaattcgcataataggtgcaattacacctattggtggcgtactgtttattgtaggttggttaatgttagtgataggtacgtttaaaatataaatttataattgttatagaattcatcttgtgggtataatacactccatgaggtgaattttttatgagtcaaaataatcagcaagtagatagaggagatttaaagaaaaatctatctgaaaaatttgtgtgggcgattgcttacgggtcttgtatcggttggggtgcatttattctaccgggtgactggataggacaatcgggaccaattgcagcagcgattggtattgtcataggtgcattgttaatgatacttattgcagtgagttacggtgcattagttgaacgattcccagtttcgggtggcgcgtttgcttttagctttttaggattcggaagatatgtaagtttcttctcatcttggtttttaacatttggttacatatgtgtagtggcattaaatgctactgcgtttagtttgttaattaaatttttactaccagatattttagaaacaggaaaattatataccattgcaggttgggacgtgtatatcactgaaattctcattgcatcattattgcttattgtatttatgtttatagcgattaaaggtgctagtgtgtcaggatcactacaatactacttctgtgtagcgatggttattactatattactattgttctttggttcgttctttggaggtaatttctctttagataatttacaaccattaaccaacgaaaaagaaggttggtttacttccatcattatgattgttgctgtcgcaccgtgggcctatgttggatttgataatattccacaaacggcagaagaatttgattttgcaccaaataagacgtttaaattaattgtatatagtttattagcagctgcatttacttatgttttaatgattttatatacaggttggttaggtacaccatcaacaagcctaaacggtaatttatggttaaccggtgctgttacgcaagaagcctttggttatattggtttagctgtattagcaattgcgattattatgggtatatttactggcttaaatggattcttaatgagttcaagccgtctcctattttcaatgggacgttcaggtattatgccttctgtattcagcaagttgcataaaaaatataagacgccttatatagcaattattttcttagtaaccattacattaattgcaccttggttaggtcgtacagcactaacttggattgttgatatgtcttctacaggtgtatcaatagcttatttcattacttgtttatcagcagctaaattatttagttataataaatcaagtaacacgtatggacctatttataaaacatttgcgattttaggatcaattgtatcatttatcttcttgttgttattattagttccaggttctccggcgtcactttcagcaccttcatacatcgcatttggcggctggttagtgattggtttaatcttctttattgtgcgttatccaaaattaaaacgcatggataatgataaattaagcttgcttatcttaaaccgttcggaaagtgaagttgtagatttaattaatgagaacaaggctgaaaacacgaataaatagcttttcttgtgattattttatgaataaagcatagaaaacttaataaatagtgaattaaaacaagtagtattcctttacggtttgctgcttgttttttattgggttaaatctataaaaaggtagaaattcaaaaaaatacttttaattaaaattgatattagtcataatatatttaaccgttgctatagattagaacgttttgagaaagagtaatgtatcaagtataggagatcaatttatgaataaagaggatttattactaacgaatataaaaaatgtatatgataaaatcgtttggctcaataaacctgtaatggaagcacgcctaaaaggatatacatcgactgaaatacattgtattgaagcaattgaaaaaagtgtgcatcctaatgtgagccaacttgcgcaaacattatttatgacacgaggcgcaattagtaaattaacaaaaaaattaattcaaaaagatgcaattattacttataaaaatcctgataataaaaaagaagtttactttaaattaacggacaaagggcgcatagcatttgatacacacgaacagttccacaaagagtttaaagaacgtgatgcacaagtctttgatgcaatgacagatgatcaatataaagctatgatgacttttttaaatcaatacaatgcacatttggataaggaaataaacgataaagaaaattaaatagaaaatgactgaaaaccagtaattaggcaaagcgatataagcaaaactatacaagtattacttaaatgagcaaggttgcttaggaagaactaggcaataatgcttgagtaaatggtaggggaacgatttatagatagctgcgtaaaaattttgttaacaagaaaacaaaaagcgagtagtattttgttgacgaagaaacaaaaggagaatgaatacgtgaaatctatagataaaatacctacaaatataatgattgctgcttgggcaatagcgctcggtgcgattacaccgatgcttgatgccacaatgatcaatattgcaattaaagatttaactcaggactttcacactacgttaagtataatacagtggggtgtgacgggttatctgcttgcattggccatcgcagtacctatatctggttggttaatgaatcaatttaatagtaagcgagtatttatttcagcagtcgttggctttgggataacttcattggcaacaggattgagttagaatatagtaacgtttattagttttagattattgcaaggctttagtgcaggtgtgataacgacattgatgcctacgatgctagtattgatcgcaggtcaaaagtatatcggtagagtcattgcaattgttagtacacctatgatattaggaccaattttgggacctgtactgggaggtttgattatacattttgcaacatggcaatggatattttttataaatatctttgtgacgattattgctgtgcctattatgattaaaaaattgcctgactttaatccagtaaataaagaaaagaaattagattatataggtgtcattaatttggctttgataagtgtgacgttactctatggtttagtacaagtatccaagtttggttcgtttaataatcctgtgacgtatatcaatatgaccattggggttatctgtataatagtttatattatttataatcgtatgaaacagtacaatacggtcttaccgacaaatttatttaaatctcgtaattttttgcttgtagtttaggattatttctagctaatgttgccatattaggtccaatgattatattgcctttattctttcaacgttttcagcatttcaatgcaaatgaaacagcgattatgttaatgccacaaggattaggtatgctaattacacgtcctttaattggtgaaattatagacaagtatggaggtagaaacattgtacttatcagtacgatggttgtactcataacatctgtttcatttatgtttatttctggtcatacgcaaagcgtttggattgggctaatcttatttataagaggttgtgcagttggtggcgtaatgttacctctgacaagttctgcatattatggattagaaagggaacaattatcggaagctggcgtaggaattaatattatagagaatattggttctagctttggttcggcacttattgcaacagttgtcgcaacagtcatacattcaatgtctgttaatataccaaatgaattaactgcatatcatgctggattttcagttgcggttattgcacttgtagtgttattgttaccagcttggtttatccattaaaaagataataaatcacagtttgcagaagaatctgtgtcataaatgaaacatataggttttgatagctaataatttatgactaaatgaatttataataaatttttaataaaataagccacacatgcactcttttcaacgcatgtgtggctatttatataaatattagattctttttttacgtatttttgtacctgaaataattagtttagaaatttgatctgcaaaaagtagacctaaggcgatagcaccagcaataagcgttacttcaagcattgtattaatggctttactaaattctaaaagtactaaatttttcgtagcatcaaatgctaaaccaccaggtacgagtggaataataccgggaatcataaaaatgatgacaggttcttttttagagcgtgccataatatgacttaagcagcctaatgcaagactaccaaagaaacttgaataaattgtatgtgtatttaaaccatcgaaaaatatggtatagaccatccaaccgcatgcacctacgatacctaccgtgttatataaacgttttgggacatcaaatataacgccgaagaatagggaagcggtataactaaatataaaatttaatatccaaaacatagacataactcctaaaatataataagtactgtactaacgccagctccaataccgaatgcagtaacgagcgcttctaatgatttggtggtaaacattaacatatgaccgccaaacaaatcttgaattgcgtttgtaattaatacaccaggtacaataggcatgactgctgcaattataatggtagaaattgaaccaccgggtatgagattatgaccgataatggtgactaatccaataactaatgcgcccataaattcagggataaattgggcatgcaatttttgttgtaatatttcgactacaatataaccgaaggaaccagctaataacgctgttaatacatcagttaaatggccgccttgtaaatataaaaaactgacagatatgacggcagcagcaatgaatttataaaaaaggtagtggttttttatactttgttcttgatatattttttgaagttcttgaaatgcatcttctaaagaaatgtcaccgagcgccaaacgtctagaaatgccatttgttctggaaatgcggtgtaaattcgtatcgcgcgttctaattctatacatacgtggatatgactcatcgtgaagcatgaagttgataacggtatttgtaacaaagctattactttctttgtgtcccaaagtgatagcgatgcgtgtcatcgtatcttctactcgagagccttctgcaccagattctaataatattcttcctgctaacatgatgacatcttttgccatcttttcattataactttctatagcttgattatatattgtcatttaatcaccaattaaagtttatttgagcaaccctgacaatcgctgactacaggttgagtataagttgctaaagtaatattttttattgtaacactttatgatcgttatttgttatttgaattggaacaagtgcttaaatgaagggaaactgtattttgtgcaattaagtcaatacatttatgtttcaaatatttcaaataggttaaaatagtattagttaactgttacagacatgtattgagtagcgacaatatacaacagttaatattaaattaggtagtgattaaaagttctcccaaacacactacattcaacaaaggcacacttatttatgtgatgagcgtgcctttgtttattgcgctgattcacacttaataaaatttgagaattctttttatgattaaagtgaattgataacacgtgtacatcggaaattgagaagatgtgtgaaaatatatataaagaaggtagcgacattaattgccgctaccttctttagtttgagaaatatgataaatccattgaatgattttataaagcaaataaatcttgtaagttatctttagtcacgatatgacctacataaaagctgccgaagtcgccataacgtgcagttgtttcatcgaatctcatttcataaacaatttttttgaattgtaatggatcatctgcaaataaagtgacaccccactcaaaatcatcaaagcccactgaaccagtgatgaattgtttgattttaccagcatattgtctacctattttaccgtgagcatacattaattcttggcgtttttctaacggtaacatataccagttataagtttcattacgacgtttatccataggatagaaacaaatatattcagattgtggtaattctgggaataatctaggtttgatgtgtggattttcataaggatcttcgtcagattttcctgcaagataattacctaattcgatgattgatacataagaataggttggaattaagaaatctgcaattttcaatttattaaattcgttttcaaaagcatttaaatctttcatttctggacgcaatgcccataaaagaatatctgctttttgacctgtaatattataaaaagcatgatcacctacgtgatttgtacgcgcttcttcatgtttatttaaaaatgtttgtaattcatctacgattgtttgacgctcttctgttggaactaagcgtaaacttgaccaatcaatagcgtataataaatgtaaactataccatccatctaacgtttctggtgcttgtggcatttaaatcgctcctttttcatgaaaaattctatgtcttcactacaaaattctaccataaaggaacacttaaaacataagtaaatgattacaaattggtgacatggaattctaagaaagaataacgtataatgaaaaacgtaaaataattaagaaaagaaatttgaggagacccctaatgactttattagatgtattacaagaaaaacttacgggaaaaaacgtgaaaatcgttttaccagaaggtgaagacgagcgcgtattagaagcggcaacacaattacaaggtactgattatgtttctcctatattattaggaaatgaatcgaacatcaaagccttagctagtgataaaggtttagaaatttcagatttagaaatcattgacccagaaacaagcgaattgaaacaagaacttgttactgcatttgttgaacgccgtaaaggtaaagcgactgaagaacaagcgcaagagatgttgaaagatgttaactactttgggacaatgcttgtttatactggtaaagcagaaggtttagtaagtggtgcggcacattcaactggtgatacggtacgtccagcgttacaaatcatcaaaacaaaaccaggtgtctctaaaacttctggtattttcttcatgattaaagacgataaacaatatatctttggagattgtgcaatcaatccaacacttgaagcacaagatttagcagaaatagctgtggaaagtgcaaaatctgctaaaagctttggcatgtcaccacgcgttgcaatgttaagcttctcaactaaaggttctgcaaaatctgacgatgttgaaaaagttgcaactgctgttaacttagctcaagagaaaattgaagcagatcatttagaagatgttgttgtagatggtgaattccaatttgacgcagcaattgtacctgaagttgctaagaaaaaagcacctgatgcaaaaattcaaggcgatgcaaatgtattcgtattcccaagcttagaagcaggtaatattggttacaaaattgcacaacgtttaggcggatttgatgcagtaggtccagtattacaaggtcttaattctccagtgaatgatttatcacgtggctgttctaaagaagacgtgtataatttatcaatcattactgcagcacaatcattgcaataatggatttagcaagtaaatattttaatggtatagattggcgttatattgatcattcctcaggattagaaccaatgcagtcttttgcatttgatgatactttttcagaaagtgttggaaaagatttatcgtgtagtgtagttcgaacgtgggtacatcagcatactgttatactggggatccatgattcaagattgcctcatttacaagaggggattcgctacctcacagaagagcgcggttacaatgcaatcgttagaaattctggaggtcttggtgttgtattagatcaaggcgtacttaatatatcgctgctctttaaaggtaaacatgatattaccattgatgaagcttttactgtaatgtatttattaattgcaaaaatgtttgaagatgaagatgtagatatcgacacacatgaaatcgaaagatcctattgtcccggtaaatttgatttgagtattaatggtaagaaatttgctggtatttctcaaagacgcgtccgtggtggaatagcagtgcaagtttatctctgtgtggaaggtgatggtagtgaacgtgctgatatgatgaaatcattttatgcgcgtgcgttacaaggtgaagaaacaaaattcacataccctgacattgaaccgcaatgcatggcctcgcttgaaacattattaggcagaacgattactgtgcaagatgtcatgtttcaattattatacgcaattaaagatttaggtggccgtctgaatatgaaccctattaccgatgaagaatggttaagttatgaaggttattttgaaaaaatgattgaacgtaatgcgaaaataaaccgctctatggattgacgttaattaaagaacaggtgagatacttcaaatcgaagtaattcacctgttctttttgttttgcggatttcagcataatttgtggtaatggatttttatatctgttgaattatagaaatgaaataagtaatatagtgaaagtatggttaaaaaatgcagtactaataaaattccttgaatttaacgtgagttttttgaatatatggctagtgcgttttataatagggaagtattgaaaataattagtagctggtgttaactttttgtaacaacgatttacagagcatttgaatcattaatttcaagtcctttgctaaaataatgcatctatgactagagtcgtatggtaatatatgaaatttatgagataatgtgtaatggtatgtgcaaaaatagaaaaagaacgattgttttagaatgaatattaaagatgctttaaataattaagcgaggcatcgttaatgaacgctgtgaaaacagtttatttcccagggaatatagttcattgcataagcagaattagaatgcgggtatacacaaaaaaggtgtagtacacagaaaatataaaattaaagaaaatactaaaggtgattgaaaatatggcacaacaaggatacggggaagcgaatggaaaggtaattttaataggcgaacatgctgttacatttggcgaaccagctattgcaattccatttacaactggaaaagttaaagcgaaaatagaatctctagagacaacaaacgcttcatatataaaaagtgatgtatacgatggagaattacaaaaggcaccagagcatttgaaagcagtgattacacgttttattgaaaaatataagatagcgacgcctattaaagtttcaatcgatacgaacttgccaccttctagaggattaggttctagtgctgcgatggcagtcgcttttgtgcgtgcaagttttgattatttggatgagccactatcggataaaatgttaatagaagaagcaaattgggctgaacgcattgctcatggtaagccgagtggtatagatacacaaacaatcgtctcaaataaacccgtatggttcaaacaaggtaaggttacaacattgaaacctttagatttaaatggttatatggtagttatcgatactggtgttcgaggttctactaaacaagctgttgaagatgtacaccaattatgtgaaggtgatagtacatatctgcaatatgttgaacatattggtaaacttgtacatgaagcaagtgaatcaattgaacatcataattttgaacaattagctaaggtgtttaatctgtgtcaaaaaaatttaagaacacttacagtcagtcatgacaaaatagaagaaatattagatgccagtaaggcgcaaggtgcgattgcaggtaaactaactggcggtggccgtggtggaagtatgattgtacttgcaactaatgaagagacagctaagcgtattgcagaaagtgcaacgcaattaggtgcgcatcatacatggattgaatatttaggagggtaatgaagttggtgaatagtggtaaggcacgtgcacatacaaatattgcactgattaagtattggggaaaggctgacgaaacatatattattccaatgaataatagtttatctgttgcgttagaacgcttttatactgaaacgaaagttacgtttgatgagagctatacgaaagatacacttatactaaatggtgaaacagttactgcaagtgaatcagctaaaattagtcgttttatggatattgttagagcgacatcaggcacaacaatgtttgcatatatagagagcgacaatcatgttccgactgctgctggtttagcatcatcagcaagtgcgtatgccgcattagcagctgcttgtgacaaggctttaaaccttggattaacgggtaaaggattatctaggttagcacgtagaggctctgggtcagcatcaagaagcatctacggtggctttgtagaatgggaaaaagggcatgatgatgaatcatcgtacagttttcccattgaagcagatcattgggaacaagagttggcaatgatttttgtagttattaataataaaacaaaaaaagtatcgagtcgtgccggtatgtcacatacacgtgatacatctcgcttttatcaatattggttaaatcatgtagatgaagacatagcgtcagttaagcatgcgattgagcgaaaagactttatgcaaatgggtgaagtcattgaagctaatggtttacgtatgcatgctaccaatttaggtgcacaacctccatttacttatatggttgaggatagctatcttgcgatggatattgttgatcagtgtagaaaagctggttatccatgttattttacaatggatgcaggacctaatgtgaaaattttagtagaaaagaaaaatcaacaagcagttattgatgctctacataaatcttttgataaagatcaaattattgcaagtgacattataagtacaggcgttgaaattattgagtaaggaagagataaaatgattcaagtaaaagcaccaggtaaactctatattgcaggtgaatatgcagttactgaaccaggatataaatccgtattaattgcggttgatcgatttgtaactgcttcaattgaagactcaaatgcccctcaaggtaccatacattctaaaacactacatcatgatccagtgacttttcaaagaagagaagatcaaatcgtcgtatccgatgtacatgcggcgaaacaacttaaatatgtcattacagcaattgaagtatttgaacaatatgtgcgcagtaatcatatcagtttaaaacatttcaatttgacgattgatagtaatttagatgacgcaaatggccataaatacgggttaggttcaagtgcagccgtgcttgtttctgtagtcaaagttttgaatgagttttatgaaacgcatttatcaaacctttatatttataaactagcggtaatcgcgaatatgaaattgcagagtttaagttcatgtggtgacatcgctgttagtatctacactggttggttagcgtacagtacatttgatcatgaatgggtctctcaacaaattgaagatacatctgttaatgaagtattgaataaaaactggccaggtctgcatattgaaccgttgcaaccaccggaaaatatggaagtattgattggttggacaggatctcctgcatcgtctcatcatttagtgagtgaagtgaaacgcttgaagtcagatccaacgttttatggtaagtttttagaacgttcccacctatgtgttgaaaagttgattcatgcttttaaaacaaaccacattaaaggtgtacaacaaatgattcgtaccaatcgcgaaattattcaatctatggataaagaagctacgatagatatagaaacggcacatctcaaagtgttgtgttctgtagcagaaaaatatggcggtgctgctaaaacttctggtgcaggtggcggtgactgtggtattacgattataaatagtgatgttaataagaaattgatatatcaagaatggttagagaatgaagtgaaaccattagaatttaatatttatcatggtcaataaagtcatgacaacttgagcagtatactaatctacagattaggtactgtttttattatatataaattaaacgaagacgggacgttagtctgtgaaatctctatataaacttgaaattttaataaaatagagtaaaataattagagttgtaaaatctaaaatacatattaagtaaggcatcataaaccttatgatgatacatataaatgaatgtttacattgtgaaatgatatttaagctgttttgataaactgtaaaccataagaaaggaatgggtgtagttgcaaaataaatttttaatttgtgatgattgccaaggggtaaactgtaagtcattagaaaaaaagttaacgaaattagatcctgaagctgaaatagaaattggctgtcagtcgtattgtggaccgggtcgccgaaaaacgtttgcttttgttaataatcgtccactcgctgcactcacagaagatgaacttatggaaaaagtggaaaaacaattacagaaaccgagagaccatgaagaagaagaacgattaagaaaacgtaatgaagaacgtaaacgtcgtaaagaagaacaagatagaaaattaaaagaaaagttagcgcaaagaaaacataaataatagctgggaaggctttaataaaataaagtacgaaaataaaatgaatactatatagttcaaaagccttacgtggatgggattacgaaatcaacaaattatatttgatgccgtaatcccattttttcaatatacgcttttaaagaacataataggtatgaaaatttgatgtcgtaatcaagcaaatatgtttagttttatagcgtaatcatgctaaattttaaatagatatcatattagataatatctattacttacgtttttattttaaatataaagaaaaagggtagagtataactacttataaaaataacagtgatatatggttaaatcaattgctgtggatagcacatacatcgctatgtgtaaaatataagagaattataaaaggagttgggctagattgactaagaaaacaaagattggtaagtcaaatgttgaagtaacacctatcgcattaggtgcaaatgcagtaggtggacataatttctataatgatttagatgaagaacaaggtaaagaaaccgtacgtaccgcagtgagaaatggtataacgttgatagatacagcttatatttatggaccagagcgttcagaagaactcgttggtgaagcggtcaaagaatttggtagagatgattttgcaattgctactaaaggcgcacactattttgatgatgatggtaatgtaaaatattcaaataatcctcaatttttaaaagatcaggttgagcaaagtttaaaacgtctgcagttagattatattgatttatattatatacattttccggatgagaacacgcctaagaatgaagctgtcgctgcactaaaagagctcaaagatgaaggtaagatcaaagcgattggggtgtccaatttcaatttagaacaattaaaagaagcgaataaagatggcttggtagatgttgtacaaatggaatataatttattaaatcgtgaaaatgagcatattttcgaatatacttcagaacacggtatcacgtttattccatatttcccactcgtttctggtttattagcaggtaaatataatgagaattcaacatttgatgatattcgtgctaaaaatccagaatttcaaggtgaaaaattcaaagaaaatttagagaaaattgatcaactacgtgatattgctgataatcacagagtggatgttgcacacattgtgttggcattttatttaacaaaaccgtcattagatattgttattccaggtgctaagcgtccaaatcaagtcgttgataatttaacaactttagatgttgaattaactgaagaagagattgaaaaaatcgaaaaattatttcctataaaataaaaaaataaaagtagatgaacatgtattatgtttatctactttttatatttataaagatgtttttaaaaatatacatttatagtaggggttataagttcaattcttgagcaaataatttaatttattattctattttaagtaaactgtttagtaattgtactttttagtgtagaattattaattaagtttaatgattttatggaaatgtatatttataatttttgaagggaatataaaatgagtagtagaaggagattaatatgatcacagttttatttggaggcagtcgaccagaagggaacactgcacgtttaactaagatggccatagctggatacgactacgaatggatagacttaacgcaatatcaattaaatccggttagagactatagacacgaagacaaaagcatagattcatatgcggatgactataagacgcttatagataaagtattagcaagtgacacagttataattgcttcgccagtttattggtatagtttatcggcatcaatgaaggcattttttgatcattggtctgaaactttattggattcaaattataaagactttaaagataagatgtctaagaaagattttagacttattatcgttggtggcgattgtcctaaagtcaaagccaaaccatgcatcacacaagttaaatatagtttagagtttctaggtgcgagtctagggggctatattattggtacagctgaaagaccgggagatattgaaaaagatgtttatgcactgtcacgtgcaaaagaatggcaacaaacacttgggaagaactaaatataacatagatagtttgggtgaattataatattgcccaagctatttttatataaatagctaaagtattttgaatactaaaattatgatataatgtagctattatgacctatctaaatagggggagaacaacatgcataaaattagaaaagcaacaccgaaagatgttgtaggcatcagagatgtagcaacaaaagcttggtataatacgtacatgaatatttatgcggctaaaactgtaaatgagttattggctgcttcatataatgaacaacatttattaaaacgattggaagatcaattgtttttagtcgtagaagaagatgaaaatattattggttttgcgaattttatttatggttctgaattatttttatcagcacattatgtaagtccattgtggcaacatcatggctatggttctgaattattaactgaaggtttaagttatttcaacgatgaatataaagaagtcttcttagaagtcgataataagaatgatgaagctgtttcgttttatgagcaaaaaggctttgaaaaattacgttcatatacgcatgttatgtatggtgaagccatggatttagcgttaatgcgtaagacaataaattagtctgcataagtataggatatggataggaggactacattgacatttacaacatatgctacacaaaaattaccagaagaaaaagtgtttaaagatccaattcataggtatatccatgtcagagatcaagtgatttgggatttgattaagacgaaagaattccaaagactaagacgtataaagcaattaggcacattatatctttcattccatacggcagaacatagtagatttggccactcgttgggtgtatatgaaattgtacgtaggttaattgatgattcatttaatggaagagaagcatggaataacgaagatcgcccgttagccttatgtgcagcattattacatgatttaggacatgggcctttttctcatagtttcgaaaagatatttaacacggatcatgaagcatttacacaggcaattattacgggtccgacggaagttaacgaagtattaagtcgtgtttcggatgattttccacaacaagttgcagatgttattaataaaacacacgataacaaattagtcatctccatgatatcttcacaaattgatgctgatagaatggattatttacaaagagatgcttattttaccggtgtatcatacggagaatttgatatggaacgtatcttgagattgatgcgtccatctaaagatgaagtgttgattaaagaaagtggtatgcacgcagtagagaactttatcatgagtcgctatcaaatgtattggcaaatttattttcacccagtcagtagagggggagaagtgttattaaataattgtttgaaacgtgcgaaatacttgtacaatgaaggctatacttttaaaatgtatccaacagatttcgtaccatttttcgaagaatccatgacaattgaacaatatgtagatttagatgaagcggttgtcttatattacttaaaggcatgggtgaaagaagaagattccatcttgagtgatttatcacgacgttttatcaatcgagatttattaaaatatatgccttttgatggttcgattataacaatctcagaattaactgatttgtttattcaagcagatatagatccgaattattattttgtcagtgagtccttctcagatttaccatatgattatgatagacctggatcaaatagacagccgattcatttactaaaacgtaatggaaaaattcgtgaaattagtagtcaatcattggttatccatagtattacaggaattaatcgagaagattataaattatattatccaaaagaactcattgcggatattgaagatgatcatgtaaaaaatgcaattaatagtatattagatgaattgaattcataatatgataacaggtaaaatgaaataaatgacttagataatttgggaggtgcacgtgagtggctggaaataaaggatttaaatttaacattattaagaatgacccacttgatgggcacaaaggtactaatataggttctatcagtttggataatgtggcgcctgtctttattgatgttcaaaataaagaagcctttattgatattggtggtatgcacgcacgttcaagtgtagaaaaaggtgttaaatggattaaagagaaagaagtcgtagaaggtgacgaagccaaggaatattggttatgctgggttacgactgaaagaggcgaaaatggaccttactatgctggcgtgacaggatgttatttattagtgaataagagcattcgcagaggttacaaaagcatgcctgaacatgttaatatgatggataaatcaatgaaacatcaaatcgatatagatcatattggtgaggacaataaagcagttttgaaagattttctacaaacacatgatttagctatgtggaataattcagataaagcattacatgaagcattagcaagtaaataataagtatagggatgtgggacagaaagtgaattttaaataatctttcatagccctacgtatcctattaagccacagatgcttaataccatatgttccctaattaaagggcatgtataagaactactaaaatttcgagtggattacatgagcaaatgctcatgcattagaactactagaatggttaaggattacgtgcgctaaaacgaatgcataagaactactcattcacataaaatgtgaaagtagttctgaaaaacagctttaaagaggtttagactatcaaagtcggaacctcttttttaatgtcatgtgttattacaaataattggattttagctatgtaacataacatccttaaaaacgatttatcaactgtatagcgactatcaagtatgctataatggtttgtattattttaaaagattagggtgaaacgtacattggaaaacaatgttaatatccaaacgaaacaagttgttaaacaatttgaaaataaagagaaatttacagcaaatacgcaagggcattggcaaaaacgtaatgcagaatttatacgttatcaagaagaaattgatggtgttgctgtcaatgtaactgttaaaattgaagaaacaggtgtgaaaatcattcgtaagggtgaaatcaaaatgaatctccattttgtagaaggtgaagatacgattactttgtatgaaattactggaggacgtatacctttaactgtgcgaacacattctattctgcattttgtaacggaacatggtggtaaattaaaagtgcattatgatttaatacaagatgatgaaaaaatgggatcttaccaatatgaaattacttataaggagcagtcttaaatgaatataattgatcaagtgaaacaaacgttgattgaagaaattaaccacagtattcaaaaagcagcgttagctgaggcaagtgatataccagatattaaaatagaaatacctaaagacgatgcaaatggtgattattctacaaacatcgcgatggtattgacgaaaatagcaaagcgtaatcctcgtgaaattgcgcaagcgattgtcgatcatttagatacgacagctgctaatgttgaaaaagttcaaattgcaggacctggatttattaatttctacttagataatgcttatttaactgaaattatctcagaggctatagataaagatgaaaaatttggtagcactgccgaacaaaatggcaaaaatatattattagaatatgtgtcagctaacccaactggagatctacatattggccacgcacgtaacgctgctgtaggtgatacacttgctaatattttaactgcggctggttatcatgtaactagagaatattatgtgaatgatgcgggtaatcaaattacgaatttagcgcgttcaatagaagcacgttattttgaagcgcttggagatgattcatttgaaatgcctgagggtggctatcatggtaaagacatcattaatattggtaaagatttagccgaaaaacaacctgaacttaaagatttgtcagaagatgaacgtattaagacatttagaaaattgggcgtagattatgaaatggaaaaattaagaacagatttatctgattttaatacgcattttgataattggtttagtgaaacgtctttatacgaaaaaggtgaaattacagaagtattaaacaaaatgtctgagcttggctacacatatgaacaagatggtgcaacgtggttgcgtacgacagattttaaagatgacaaagacagagtgttaattaaaaatgatggcaattatacgtatttcttaccagacattgcatatcattttgataaaatcaaacgtggtaacgatacgttaattaatttatttggtgcggatcatcatgggtatatcaatcgtcttaaggcttcattagaaacgtttggtgttgaaagtgaccgtcttgaaatacaaatcatgcaaatggttcgtttaatgcaagatggacaagaagttaagatgagcaaacgtactgggaatgcaatcacgttacgagaaattatggatgaagttggcgtagacgcagcacgttatttcctcacaatgcgtagccctgacacacactttgatttcgatatggaacttgcgaaacaagaatcacaagataatccagtttactatgcacaatatgcacatgcgcgtatttgttctatattgaaacaagctgctgaaagaggtattacaccatctaaagatgcggattataccttgattacaaatgataaagcgattgatttattgaagaaagttgctgaatttgaaacaacaattcaaagtgcggctgccaatagagcaccacatagaattacaaactatattcaagatttagcatcacacttccataaattttataatgctgaaaaagtattaacagatgatgttgaaaaaacaaaagcattgattgcacttatagatgcagtaagaattacgttgcgtaatgcgctaagtttagttggtgtaaatgcaccagaaacaatgtaaacggaaagtgtaatggttgagagctagtattaggtttgtcatggatgaagagagatgtttcattcaagtgacaaatcttactagctctttttgttagtgaaaataagcgtgcaaatgaggtgtttaaaatgacattggatacagaaagtttatatcgcattttatataagcatatggggccacaaggttggtggcctgcagattcaaaaatagaaatcattttgggagcgattttagttcaaaatacgaattggcgaaacgcagcctatgccattgattcattaaaacaagctactctattggatccacaccatatcttgaatttagaattagaagatctacaaacattaattaagtcgagtggattttataaaaataaagcgaaaaccatactggcattactaagttggttgcatcaatacgattttgactataaagccattgctgataaatatcatactaatcttagagaccagttgttgcatataaaaggtgttggaagtgaaacagccgatgtactcatcgtttatgtatttgaaggtatcgaatacatacctgacagttacacaagaagaatttatcgtttactcggatatgaacatacagaacaatatgacaaattgaaacgcaacgtatcattacctgaaacctttacgaaccaagatgcaaatgaatttcatgctttattggataattttggaaaaaattattttaacggcaatgcctcacatcaatatacatttttagatgaatactttgaatacaatgactaaaatgatatagaaattagactctaatcagtattaattaagggttatcatcaatcaaataatagaaagtttatatatatgtgtagcttaaaaaattaaattaaatagttatttttaaaaataatagtaaaaagcgcatgaaaatttgatatgattaaagcaaataataaactaggagattatatcatgaaaaagcaatttaaagtcatttatctttttattattttagctgttatattggctgcatgtagtaccaattctgacaaatccactaaaaacgagcagtcagaaaaatcatatgacagaattatttctcttattcctagtaatacggaaatattgtatgaattgggtctaggagataaagtggtcggtgtatcaactgtagatgactatccgaaagaggtaaaagataaaaaacagtttgatgctatgaaattaaataaagaggcgttattaaaggctaaacctgatttaatactcgcacatgaatctcagaaatcaacagatggtaaagtactgaatggattgaaagacagtggtgttaaagtggtctatgttaaagatgcacaatctattgatgagatgtatgaaacttttaagcaggtcggtaaagtgacaggtaaagaaaaagaagccaatgcgttagtgaaagagactaaaaataatattaaaaaagttgtgaattcagtgccaaaagacgcaaaatctcaaaaggtttttatggaagtatcttcagaacctgagatatatacgggaggaaaaaatacattttttgatgatatgttgaagcaactgaaagctaaaaatagcttttcaaatctagatggttggcaaaaagttagcaaagaagcaattattaagaaaaatccagatgtgatgatttcaacgatgggtatttcagaaaaagattatcaacaaattatcgacaagagaggcggatttgaatcattaaatgctgtgcaaaaaggtagaattgaagcggtgaatggtgatcaaatttctcgaccaggacctcgtattgatgatggtctcaaagctttaagagatgcaatttataatgaaaaatagtcagtgtagtgagttctaattaaaaagattatttaagtaacaccctgaagtttgtttgtacatacttttcagggtgttttttctgattaataatttataataaatgggatagtgttcgatgtgttcagatggtattgtaggagagtgaagatttatttgaaagtgtggcaaaaacatgaagtatactaaaacaatgtgtttatggattgtgttcattatcattagtttattgctgagcttattttggggtttgggtgatataagtgatacgctatcacaaacaatattatatcaagtaagaattccacgtactttacaagccttgttagccggtgttggtttaacacttgctggacatatgtttcaaacattgttgaacaacccgcttgcagatagttttacattaggattggcaagtggtgctacatttggatctgggctagctgtcgttataggcgtttcatttatttggttacctatattttcagtgttatttagcataatgactttaatactggttattgcactaaccagtgtaatgtctagagggtatccggttagaacactaatcttggctggcataatgattggtgcattatttaatgcatttttatatgtgctcattatttttaatcaagaaaaaatgaacaatatcgttaattatatgtttggtggcttctcatctgcagaatataacgaagtgatttatatcggtattgtattatccataggtatgataattttattgagtttggtgtcaaaaattaaaatattacagcttggtgatttacgagctcagtcattggggcttaatgtgcgtagtgtaacgtatagtgtcttgttaatcgcctccatcataactgccgtcattgttgcatatgtaggtgttattggatttattgggatggttattccacagctcgtacgaagaagtcgcgcacattataatctaagacaacaaatgttattgaatattgtgattggtggtacaattatggtactttcagattggttaggtagtgtcgtattagaccctttccaagtaccagctagtattatactcgcattgttggggattcccgtattgttttacattatcgcgacacaaccgcgaatgcaagaatagtcattttaaggtaaaataaataaatcagattgcagtaaatacagggaataatatcatttttaatagagtgacatattaattaaagaggttatgataatggatttaacacaaataaaagcgattgtatttgatttagaaggcacccttttggatagaaaaaaatcacgcgagaaatttatagaagaacaatatgagcggtttcatgattatttagtacgtattcaattagcagattttaagagaaaatttatagagttagacgatgatgaagaccatgataaaccagaactttataaagccatcattaaagattttcatgtcgatcgattaacatggagagacttgtttaatgattttgaaatgcatttttatcgctatgtgtttccatactatgacacattgtatactttagagaaattaacagaaagtggttatctaacaggtgttatcgccaatggcagatctaaaattaaacaataccgaatgcacgccttaggtgtagaagatgctataaactacttatctacttcagaaacagtgggttatcgaaaaccacatccgaaaatttttgaagacatgcttgatcaattaggtactcaacctgaagaaacaatgtatgtaggtgatgacccattaaatgatgttgcgccagcaagagcaatgggaatggtaagtgtgtggtttaaagaagatgatgaagtggatgttgaaccattgccagaagaagttgatttcacgattaacacgacagaagaattattatctatattaccaattgcaaagaaaggaagagaataaatgaatttatttacaacaagcgacggtactgcgctcaattacagaacgagtggtgaaggcaatgcaatagtgatgattcacactgcattcgataatttaacagtatttgatataatcgaagaaaattttactgatgataaccaagttatacttgttgatttaagaggtcacggatactctgacaaaccacaacatattgatttcaaggaatatgctgaagatattaaagagctattagactatttatatgtcacacaagcatcattgattggtcatgaattaggaggatctgttgctagcgcatttgcagcaatgtatccagaaatggctgactcaattacattagtaaatccaacgctgttaaacgatatgtctccagaagaacgtttatatcgcaggtatgccaatcaaattagaaattgggataaagaagaacaacagaaatttttagataagcatttatattactcaaaacgtaaagctaagaaattcttaaaacatgtagataatacaaatggtatcgctacagaagcagaattagaagcagtcaaagattcatttaatgacaataatatcatgagttatttaagtgaaattgatttacctattttgattattgctggtcaacatggtgaaagaacaaccattgttgaagcgaaagaagtgggagattatattggtgaagtacaatttgaaacatttactgcgtctggattatatccatttgttgaagaaaaagataaatttgtagatttggtgttaaaatttatcaaagacaatgaaaaagaattaacatattaaccttcaattcgatatgaatgaaagtttgtaagtgctgttatgcagcaattttttattacaagtcgcactgtttttgtaatcttattgtaacaatactgttattttagtaacatttatagtacaatatgggtgagcacaaagaaacttataaacagaaggagagcgtgcttatgaaaaaattatttgcagcagtaatcgtatcggggttagcactttccggaatgagcacaggtagtgttgatgccgcgtcaggtaactctatccaaaatgttaaatcactgcaacaaggagatacaacgttagaaggtgcgaaaatcggcgaatctgttcaaaacttattgaaatctaatgatgtatccgtatactcacacagaccggatggcaaagaacattattatgaatttaaaaaagataatggtgtacttgttgtaacagctgacggtaaaaagaacaacggtaaaattacgcgtgtttctatgagttataatgatacaaacggtccaacttacaaagcggttaaaaacattgttggtagtaatgctgttacacgtgagcattataataatgtaactggtaatttcggttatgttcaagacaatgatttatcatatcaatttagttcttcatcaccaagtgataaaaacattaaattgtaccgtattgatttgactgaatcataaatatcagtgaaacaatgtaaatagcttatataagctgaaacgcatgcgcaaatattgctacaatgcgttattggttacaagcattgcgacatttgcataagaactactttttcacgaaagagtagttctatagaaaacgatgtattaacgtcacttgagttagagatagtcgctaacgtataatataaattagagtctgggacttatatagtgtctcagactctaatttatattggacattaaatcatacgaataagcaatggcttgtgtatggtaaatcaagtgggggtttcgaaacctttattgaaaatgaaattatctatcctgtacttgttattttattgttaaaatcaagtgtagtatgagattattaaagaaacagctttgatatctcaactacaatagtgttgatagattaaagtgaattttataaaaggagtcaaatatgagagttaacgataaggttttagtagaaaatattaatgactattttactcataaaggtctttctccaaacttaatagaagatattaaagagaaattaaaaaaggatttccaaaaatctgaagccaaagatgaagactatattgaatatagacgaaaatcaccagcagaaataatactaacgattcaacgcaatttattcacactacaactcaatcctattattttttttattgttaattttattttactttcttacttatatgataagcaatatgtatcatttcaggcagctacgggcacctctattttttactttttaattattttaccaatttcaatcttcatatacttgcgaattgattggaagaattatttatacagtaataagtttgaaatggtgattggcttagtagtggccattgctgcgtttgttctcgtgatattacatacatttgatattaatttaggtattgtagcagttacaatatatgcacatcaagtcgtattttttataggtatattattcagtatttcaggtatttattttaaaagattagagtttacaggaattggattactattatgtcaaaaaacaattgatgcgatgattggaaacgcgagtattgcacaaattggctcaatcattatttggatattattgttaattgtcattatttattatacaatccgcatctcttctagaaattaatagtatttatgatttaaacacttaaatgaagcgaacacgtttcagtgctaaacacctaaggtatggtgtggcattggaacgtgtttttttatttataagcatgtatttaatgttaattgaatatggggacataatttaaaattaaaaagagagcataaggcgattcaattacgggtatatgaattttgtaaagggaggtggcccaaaatggaaaaagtcgcaacaaattataacaacgagattgcatacatccgagagggtcaaggttttcctgtgatactgattcatggcctagatggcaacatggcttcattatatagcctaaaagatgaattaaaacataaatttgaagtaattgtttatgatgtaagaggacacggtaaatcaacaaaaaagaattcgtttaatttagaagatcatgtagaagatttaaaggctttgatgacaaaattgaatatttcatctgcacatcttattggtcatgacatgggaggattaattgcaaagcatttcactgataaatatggatcaatggtcgcaacattaactttaattgcttgtaatcttattgatagtgtacatgctttaaataaattaatgattgagcaccaagatgaaattgaaggttttgataaatctgaagcactgatattattattgccttatatgtataaagaacaagaaaaagctaagaaatggtttcaaaatcaattgatttatagtagacaatcagcagaagatagtgctgtagccacacgagcattaatgaattttcctgtatttaataaagatgttgttattaaacaaacggatgtgcctacattaattgttaatggtgtatatgatcctttaatgacaacagagactattgaaaaatatcattatgcatttaaaagactgcaaatacagacatttaatgaatcaggtcatgccccacatattgaagaaccagaacattttttagatgtttacagtgattttataaaggctaatgaatttcaaaaagaataattagatttagtggatttttaaagcaatgaatatatcaacatagttgcagaatgaagtgttttgaattttagataaaattgagatgagacagaaaccaaattttaaaaacttggtttctgtctcagttatgtaattaaagatgcttaggatgtaggcacagctaaaatacataaataggggtattttaatataacaaatacctgtcttatcatagtcaaagaggccgagacatgcattacatgtctcggcctcttttgatagtaagcttaaacttctttttcgtcgttagcttctttaatgcgatcattcacacgtgataataactcgttaatttttttacgttgtttagtgttaactaaaattaatactgttctttcatcatgttcattacgttttttatcgaaataatcttcttgagataagtttttaactgctttaacaacttgaggttgtttatagttcaaatgattaataatatcttttaaataatattcttcactttcgtgttcgctaatataagttaatacagcaaactcctcgaaacttattgaaaattcttttttgataattccttttaatttatcagcgtaagtaaccatcgctaataattcaaagcaatcattgattttggtgatagccatccttattcctccctattttattgcccaatcaaatatacatgttaaaagtgtttttgtataaatatttgtcttaattcaaagttaaatacaaagagtttatcataatttgcagacctattatatttgagtaaaatatattaaaactgctattatttagtttattataactaaataaaaatagaaagtaaacaaaaaactgtttaagcggtacatgaatgatttaagatattaattcaattctttaaataccaatgagggaaatataattaatatttctcattttcaattttccatgatttgataaaattactaaaaaaataatttctaattaaagatgtttactatttataccgtgtacgtttaatttttcgacagaacatgatttgcatttttagcaattgtatcgcctatatttaaaccttctataactttcatatctttgttattacccaatttttctgttttaataacccgtttaataaattttttatttctttgtaaaaaaacgaattgctttttatatattgcagtttttggaatttcaatagtgtaattaggtttttctacgcgtaaatgccgaccgaatttaatatccggtgttgaactgatttcaacatgatactgagatgattttgtattagcttcagtatttaaaggtaatttactaatgaaatttacagtacctgtgaaactatgacctggatcaatgcatatgtgtactttatcctttaattccaatgtatttactattgattctggaactttagctttgattatagcactgggattaaaaatttgcagaataagaccattattttgagaaggcacacgttgattaatggcaatttgaccatccatcgatgcgtaaatcgttgtgcgtagttgtgtttgcagggtttcaatttcatgttgtgtacgatttctttcaattgagattgtaggatacttaagtgggtcaatgttattcaagtgggctaagtatttttgtttagaagtgatttggtgctcgatgtcaacattgtaatattcaaataggggctggttcttattgacgtgttcttcattcttaacaaaccaattgtggatgatgcctttatttgaatcgaaaaaaatatttgttagttgagaaggcgattgtatacctgtgaagtgttgtggttctttatattgaattttgagtgtttccactgtatggggatgctcagtatgagactttgttaaatagagccagcttagtagggtgatactacaaaataaagcgagtagtgtgataaaaattaaaaatttccgcaaagaagtcacctcttgatgttttgataaccctattatactgcggtgtagcattgcttttctataaaaaaatagcgtcatttaccaaaagtttaaagtaaataacgctacgatacatttttagaataatctcaataaaataataccaatcattatcgcaatgatgccaatgatttttcgcgtagtgattttattaatgcgcgtacctaataaaccaaaatgatcaatgattacacccattagcatttgacctaacataacgataatcgtcgttagtgcagcaccaagatgtggcattaatatgatatttgtagttacgaatacaacccccagtataccaccgataaaatagattggtttgagtttaccttgttttgcatcgactgtcttgagtttaagacttctattaaatatcaatgtaagtatgaataggacaatggtaccaaccgcgaatgaaatcaatgaggccataacagatgagtgtatttgttgacctaaagcactattgatagctgtttggattggaggacaaaaaccaaagataaatccaatcactaaccagatataaacgggtgatgacttatttgtttcaatgggtgttctttttacatagttcataagtatgatgccgaaaattaaaacaatgatacctagtactttaaagatagtaaaaggttcttgatttgcaccaaaccagccaaaggtatcaatcatgacgcccataataatttgaccagatacagtcataacaacggttaatgacgcgcctaaacgaggtaatagcaatagattaccagtaaggaaaataacaccaagcataccaccgacaaaccatatgtaactgaaagattgattattgtaaaactgtgctgtaaatacatgaggattggtaataagattaattaaaattaaaaaaatagttccggttgcaaatgagattgtagacgcatagaatgaagatttcgtataaagacttaatctagagttgattgaagtttgaaaaggaaccaccatacctgcgacaatcccgattatatataagaggatcattaaatcacgctttctttcaagatatatatacattatataggaaagagaaaaatatgcatacatttaaattcaatcaagaaatatttgtatattacagaaaataatgtacacaatacacaaaatgtaataaaatatgtatgttgataaatttagaattttaaaaattagcaaaattaatcaattttaaataacagaagtaatacaagaagtgagtgactatagatagtgaaacggctttccataattcgacttttagatcaagaaacttttttcttgggtgtaggtagaaatgataatataaaaaaacatcaatttttagaagtgttgaattcaaggcattcttataaaaatttagcccaagtcgtcgaagtatatgatcagtatgcgatatgtaaaaaattaggtaagaaaaagatattttttggcgatactgttagattacgaccacatagagattaagccaccttcaaaaataaaggagaactagtccgttcatggatcagttctcctttatttttaaaatcaattattagatatcgacaattctgtaggtgcttatgaatactgttctaagcgtagcataacgtaaccaactcattacattatgtataagtatattcaaatacaaggtttattggtctattaacaataatagtttagtgaattatcaattttcataataatgaagaaaacggcaatttctatttgaattaaatagaaattaccgttgttttattaatctaagatgtttatgacctatgcaccagttactttatagcaattgtaggcgaccaacgtaattagatttataacttactttcgttcaagtaaatgacatagtctgattgtagggcataggtatctactttagctaactttttaaatcttctatattttgatttaatagtgtgactaggaagtccgttataaaagtttctaccattaagttaaatagtttagttttcaaatatgagtttagtagatttgtctataatctgtgctgaatgaatagacgttggaataccagatttaggtcgtaaaatatctaaatctatgattttagtcataccttctttaactgctgattcgtttacgaagtgttcaattttgggtaatggtaatttgattgctttatttactgcatcattgaatataagctctagggtttgtgacattgtttagtgcctcctcatttagttaatagcttcggtcttaatgacttctagcttgtcaaaacgttctccagtgatttgttcgataattgatttaaagcttttgagttgttctggtgtcgcttcagtatttaaattagtaaagtgacgtttgacctgactggcttttccatctttatcgtacagtgtgcgtgacattgttactgcaagttgactaattgtactcatctgtttcaacctcctttcactatatatatcgaaattaaatagtgaattggccaaaaataatttgagaaatttaagttaatccctttcatgtgacataaatatcatatatcattaaataagaaacatttatggttgagaggtgaatatatgaaccaagtagatccaattagggatattaatgagataaaggcaatgtataaagtacttagttgtaaatcaaaacgtgattatttattttttaaatttgcgatacatacaggtgtgaaactgtccgaattattaaacctttgtgtgagtgatgtaaaaggtgaagaaaataaaattaaatattattggcttgaagaacatgcatcgaatattcatattagattgccagataaattaagaaatgaattggcacaatatatagaagaagagcatttagaggatagccaattattatttcaatccaatagaacattgaaaggtttgtcacgtcagcaggcgtatagaattatacatgctgcagcagtagaactaggcatgttacatataggtttaactacgcttaggaaaacatttgcgtatcatgcgtatcaatcaggtatttcaatttctattattcaaaagtatctaggtcatcaaaccacgtatgaaacgatgaaatttattggtatttcaactaaagcaagtaaaacaacaatagctttaaatttataaaataataactaaaggggggatacgatgagtttagtatatctactaagcactttaatattaataatggtcattctattatttacactgacaaatataaaattccagaaatatgctggacatatagcacttttagcacccatagttgcttcggtttactttttgtatcagctaccatctgtgatgcaaggaaactttgtatcagttaaaataccttggctcacattattagatatcaatatagactttcgacttgatggtttaagtttattttttagtttattaatttctcttattggattagccgttgtttattatgcaacacaatacttatctaaagaacatgataatttaccacgtttttatgtgtatttattattatttatgttcagtatgttaggcattgtaacagctaacaatacaattttaatgtatgtattctgggaattaacaagtgtttcctcatttttacttattgtttattggtacagtaagggtgatagtcagttcggtgcaatacaatcgtttatgattacagtatttggtggactggcattattggcaggtttcatcatgatctacattgtaactggtacgaattcaatcacttctattattgaacagagtgataaaattgcacaaagtcatttatttataccaattatcatcctgctactacttggcgcatttactaaatctgcccaatttcctttccatatatggttaccaaaagccatggcagcaccgacacctgtgagtgcgtatctacattcagctactatggtaaaagcaggtatctttttactatttagatttacacctgtattaggattaagtgatttttacatttatagtgtcacatttgttggtttaattacgatgatttttggtgcagtgaatgccacaagacaatttgatatgaaagcaatattagcttactcaaccattagtcaattaggaatgattgtttctatggtaggccttggaggtggctttgcacaacatccaacaggtgagttgtcaaaaatttatggcatgattttatttgcagcactattccatctgatgaatcacgcattatataaaggtgccttatttatgggcgtaggtattatcgaccatgaaacgggtacaagggatattcgccgtttatctggtttgaaaaaagtatttccaatcacacacattgtgatgttactatctgctttatctatggcaggtataccgtttttaaatggctttttaagtaaagagatgttctttgatggattagtaagtacatttgaattacctcaatttaatctcacgcttacagttatcattactgtaatcggtgtgatcgcaagtatattcacattggtttatggtgtttatatgatcaaagaagtattctggggagactatcaacaagcagacttaccaaaaaaatcaccgcatgaaccatttttattcacgctaccttctgcaattatgatgattttgttaccggtcatattctttattcctaatctatttggacataatatcattttaccggcattacgaagtatcacaattggagaaaaagtagatcaagttgcaccgcatgtatcacaatggcatggctttaacttaccgttaatcttaagcttaattgtgatagtagtcggatttatcatggcacttagaattaattggaaaaagtatgcaaatcaagtgaaagtaaaaacgattactgatttatatttaggttcatataaacaatttgaacattattctggttatggtattcgctcattaatgaataaccgtttgaatcattatattacgattaccttgctcatttttagtatggttgtcatctacggtatgattcaagctggtttcccagaagtacatcaaattcatgtaagtgatttcggtccgatagaggtcattacgttaattgttgtattcgtcctgggtattgcactcacctttattagacaacgtttaactatggttgtccttaatgggattattggttattgtgtaacgatattctttatcttaatgaaagcaccagatttagcgttaacgcaattagtagtagaaacaataacaacaattctatttattgttagtttctctagactgcctaacgtaccacgtgcgaaagttaataaaaaacgtgaagcagtcaaaattattgtttcattattgatggcagtcattgttgttacacttgtatttattgcacaacaaggtgattcgatgccaacaatttcaacattctatcatgatgcatataaattaacaggtggtaaaaatatcgtgaatgcaattcttggggattttcgtgccatagatacattgtttgaaggtatggtactcattattgccggattaggtatttatacgctacttaactttaaagaacggaggggtcaagatgaaagagaatgatgttgtattaaaaaccgtaacgaagatcgttgtgtttattttgttaacatttggattctacttgtttttggcaggtcataataatccaggtggcggatttatcggcggtctcgtgtttagttcagcgtttttactaatgttcttggcttttgatgttaaacaagtattagtagcgttaccgcttgattttagaattctaatgatttgtggttcattactatcatttctcactgctgttgtacctatgttctttggtaaaccgttcctttaccaaacagatgcttatgtacaattaccgttattaggggaagtgcacttaacgacagttaccgtatttgaagcgggaatcgtattagccgttgtgggtgttgttgtgaccgttatgttgtctatcagtggtggtcgttcatgaatctgatattattaatggtcattggcttcttaatatttatagggacgtatatgatattatcagtcaatttaatccgtattgttataggcatttcgatttatacacacgcaggtaatttaattattatgagtatgggtaattatagtaaaaataaagtggaacctttaataggtgaaggaagtcaaaattttgtcgatcctttattacaagccattgttttaacggcgattgttattggttttgctatgacggctttccttcttgtattagtttacagaacctatcgtgtgacaaaagaagatgaaattgatgtattgagaggtgatgacgacgatgctaatgagtaatttattgattttaccattacttctgccagctgtatgtgctttaggccttgtgtttatacgtacacacagtagattatctagaatattttctatcggtacaatggcagtaacgacagttgtttcattgcttctactaatttatgttatgtaccataagccgattgctttagattttggtggttggcaagcaccttttggtatacagtttgtcggtgactcactaagtctcttattggttacaacatcaagttttgttgtcacactgattatggcatatggatttggtagaactgaaaaacgtgccattcgttattatctaccaagttttattttgtttttaacagtgggtgtcatcggttcgttcttaacggcagatttatttaacatctatgttatgttcgaagtgatgttactagcgtcatttgtacttatcactttgggacaatcagttgagcagttacgtgcagccattatctatgtagtattgaatatattaggttcatggttactcttgctcggtgttggtttgttatacaaactgactggtacactaaactttacgcttgttgcacaaagattaaatgaaatggatgataagagttcaattgtcattgtctctatggtcttcttgattgcattcagtgccaaagcagcacttgtgctatttatgtggttacctaaggcatatgccgtattaaatactgaactggctgcattgtttgctgctttaatgactaaagtcggtgcatatgcattaattcgtttcttcacattaatatttgatgaacatagtggtattacacatccattattagtctttttatcttgtattacgatgttgattggtgcatttggtgtacttgcttatagggatattaagaaaattgctgcctatcaagttattctatcgattggtttcataattttaggattaggtacgaatacaatcgctggcgtaaacggcgcgatcttttatttagcaaatgatattgtagtgaaaacattgcttttctttattattggtagtttggtatacattactggtcttagacaatataaaagtttatatgggcttgccaaacaagaacccttctttggtgtagcttttgtagtcatgatattagcaatcggcggcgtgccaccatttagtggttttccaggtaaagtatttatttttaaaggtgcgattgaaaatggaaattacattggtttagcattaatgattataacgagtttaattgctatgtttagtttatttagaattttctttgtgatgtaccttggtaatgaaaacaaaggagaggcaattgtatttaataaaatacctacttatcgtaaaaatttaatcggcgtactggttgctatgatcatcgtaatgggcttagccgcaccattactatttaaagtgacagataatgcgacacatttaaatatggatgatggattatatgaaaaaatggtaaatcctcatttaataaagggggataaataatgagacaagtcttacttaatattgtcatcgcatttttatgggtattatttcaagatgaagactcttttaaattatccaccttctttgcaggttatctcattggtatattagttatctatattttacaccgctttttcggccaacaattttatttaaaaaaagtttgggttggtattaaatttttagccgtgtatctttaccaattaataacatcaagtatgacaataatcaattatattttatttaagaccaaagatttaaatccaggattagtgacttatgaaacaacattagataatgattgggaagtcacattcttaactatattgatcatcatcacgccaggatcaaccgtaattagaatatctaaagaaaagaaaaagttctttatacatgcaattgacgtttccgacaaagagaagcaaaaattgttgaaaagtattagacaatatgaaggactcatattggaggtggcagaatgatcggcacactaacagattttttcataacaagcgcactgattttatttggtattgctttattattaactttatttagattaattaaaggaccgaccactgcggatagagttgtcacattcgatgctgctagtgctatattgatgtctatggttggtttgttaagtattgtatttggaactttttcgttcttggattcaatcttacttatcgctatcatttcattcgtaagtacggtgtcaatttctagatttatagaagggggacacgtcttcaatgcaaataacaagcgaaatcgttaatctaatcgcagcaattatgattttcttaggaagtatcattgctttaataagttctattggattaatcaaattccaggatgtttttttacgaagtcatgcagcgactaaaagttctacgatatctgtattattaacgttagtgggtgttatcatattctttatttcttcacaaggctatttaagtgtaagactaatattagcactggtgtttattaatttaacatctccagttggtggacatttgatttcacgtgccgcttatcgaactggcgcttatatgtatagaaaaagtgatgcaccaagacaaacgaatattttactgagttcctctgaaaacaatacgtttgagcaactgaaacaacgtgcgcatgaacgtgaagaacgaagacgtaaaacttatgaaaaagagcatgattattaatgaacgaatataatcgcaggaagtaggatgatgagacccgtttcggctgggtttccatgctacttctttttttgttgttaagtacatgatgataaaatatgattgctgcacaatgaatttaattgcttaaataaaaagttttgtagcaatagaatgatataagagtgaataaataaaaaatatgtatgaaatattttattttcaagtgcaatacgtttaagtgatggggcataaaatgataaaataaaatatatttgtaattgtgtttatttttaagttcattatcaaattggggaatgaaattaatttgataatttgtgattaagagtttgggacgcaatatattcatgtaaagacgatgttattttttgtttcaacctcaacaattatgaaagaataatgacgtttaaaagaggtgaaaccttgcaaatatttgaaactatacttatatttttagcactagtcatattaagttcattcttacacacttttcttccaaaaatacctttagctttcattcaaattatattaggtatgctattgtatgtcacacctattccagtacaatttaattttgattcagaattatttatggtggctttaattgctccgttacttttcgtagagggtgttaaagtctctcgtgttcatttaaggcgatatattaaacctgtgttaatgatggcattagggttggtagtgacaactgtgattgtagtaggtttatttgtgcattggatttggcctgagttacctatggcagctgctttcgcactcgctgcaatattgtgtccaacggatgccgttgcagtccaagcaatcacgaatggcaaaatacttcctaaaggttctatgacaattttagagggtgagtctttattaaatgatgcagcaggtatcatatcttttaaaattgccgtagcagcattgattacaggtggattttcaatggtgaatgcagttgaacaatttttaatttcttcaattggtggatttattgttgggttattaattggtgtcgcacttgttcgtttccgtgtgacgttatcaagacgtggcattgaaaatattaatatgtttacatttatccaacttgtaacaccatttatcacatatatcgttgccgaaatgttccatgcttctggtattattgcagcagttgttgcaggtttagtacatggttttgaacgtgatcgaattgctcaagcacgtactaggttgcagatgagctataatcacacatggaatatattaggatatgcattaaatggatttgtgttttctatcttaggatttttaattcctgaagttgtagggagaattattgagaacgaaccgcataacttaatattcttaattactgtgacatgtcttattgcattagctatttatctgttcagatttttatgggtttttgttttatatccttatttttatttaccggtgagcccgttccaaaaaatgatttcacataatgaggatgatcagaaaactgcagaaaccccgccaaaaagaggcatgtatgcgtttataatgacgttgtgtggggtgcatggtacgatttccttagcaatcgcactgacattgccatatatgttagcagatcatcattcatttatttttagagatgacctattatttattgcctcaggtatggttattatcagtttaattgtggcacagatgattttaccagtcgttacaccgaatgctaaaaaacctaaaatcgttggtatgaactttaagcaggcacgtgtttatattttagaaaaagttatcgattcattaaatcagcaatcgtcagttacgtctagtttccaatatggtaatgttataaaagattatcatgataagctagcatttttaagaacggttgaaaatgaagatgaaaatactaaagagcttcagagacttcaaaaattagcatttgatgtagaaaatcaaacattaaatggtcttgttgaaaatggcgatattactacaaacgtgttggataactacatgcgttatacagaacgaacacaagtatataaacaagcttcgttattacaacgtatcaaagttgaagtaagagcaatgattttaaagagaagaatacgtacgaaagtgaaaacgaatgcggcctctccattatctgttgtagataacttacgtgagatttccaacattatgcgtacagtacattatcgtgtagtgagtcgattaggcaaagaaacaacggaaaacaataaattagaagttggtatgatttgtgatagttatcttattcgtatcgataatttaacaccttccaatttctttaatcctaaaaatgagaactctatcacgaaaattaaattaagcgcattaaaagagcaacgtcgtattttaaatcaacttgtagaagatgaagaagtaagtgaagtaacagctttaaaaattcgtgaagcaattaattatgatgagatgattattgtagatagttcaacggattgataaggtaataaataacactagattccattttggaagatagttataaactgccaacaaagtatccaactttgttggcagtttttttttgaacacttttagcaggtactgtcttaacctgtagtttttggctagtattttcccgtaagagtcagtcgaatatgatatgtaaaagatgaatacttgagctaaagcgcatgcataagtgccactaagtcatgtaatgagaaggaataattgagctaaagctcatgcataagcgaaactaatttttttcaaagtggaggaatacttgagctaaagcgcatgcataagtgccactaagtcaatgactaagtggcactaaaaaaactccatcaatggggggaggagccaccattgatggagtgtaagggagatgatttaaggcttgaataccaccatgccgtacgtttaattaggagggaagtcgtacgacatgggactattcacctatgactaggttaatagcccgcaccatctattccatgctgccgtgtacagtttctatattcgatttcatcatattgtaatatgaatcacctttagaaccttcttgtccgattgaatcggtaaatacttcaccgtatatatctttcttcgtttcttcacttaaactttgcatactcttcttatcgacacttgtctcgacaagtaagtgtttaagttgattatctttcacgaattcaattgcttgtttcatttgttcaggagtaccttgtttttcagtattaatttcccaaatataacctggcttaatgtcatattgtttagagaaatatttaaaagcaccttcacttgtaataattgctctgcgatcttttggaatatcattgaatttttcgtgactctctttatttaatgattctaatttagcaatatagtctttactatgagattcgatatcttctttgtgtttttcatcatgttttaataaggtatcacgtatcgtttcaacatatttaatcccattttctaaacttagccatgcatgaggatcttgtttagattcatcgccttcagcaccatttaaataaaaaggttttactttttcagatactttaaccacactgtcatctttagttgatttattagcttgagataacgctttgtcgaaccaaccattaccagtttctaaatttaagccattatagaaaacaatatctgcatctgttaatgctttgatgtcttttggttttacttcatattcatgaggatcttgaccaacagggacaatactgtgaatttcgacattatcaccaccggcatttttcaccatatcgtataaaatagagttagtcgtaacgacttttagtttttcatttgaatttgagtttgaatcactttttccattactacatgctgctaaaaataatagtaggataagtgcaatcgatattaactttttcatatttgttgtcctttcttattgaaaatattgaatttgtttaaaatgaatatcacaacataaattataaatgcacagaatacaattgtggcaccacttggaatgttataaacataactaatatacaaaccaacaattgcactaatcgtacttataatacttgaaataatcatcatagtatgtaattttttggcgattaaaaatgctgcagaagcaggtgtaatcaatagtgctactactaagataatgccaacggtttgaatacttgcgacagttacgagagataataacaacattacaaaataatgaaatacagttgtatttaatccgctcattctactgaaaactggatcaaatgtagataccattaatggtctataa

SEQ ID NO: 51 - DNA, 45112 bp, Staphylococcus saprophyticus
  misc_feature (534)..(534): n is a, c, g, or t
taataaaataaaaggtgttgcaaatgcatcataatcaatcatttcatttctatattgtgtattactgatatttttttcacgatatgcgacatcattgtcagctaagtagtttttgatgaaagtacaaggtggacaatcattttgtgtgtatatgataatctcgttcataatcggtttatcctttctttattcaatttactataatataagagactttagaatatatttcaagtcttttaaattgtatgaaattagacattaatttgtcactttattttgagagaaataaatttaaaaaatatgtacaccggtttataatggaaagacgttgtgatttttgtcacaaataaataaaaagggtgatattatggattcagttgaattagcacggtttttaactgcgatgacactcgcagtgcatataatttttgcaacaattggtgtggggatgccagtcatgttcgctgttgccgaatttattggtattaagaaaaataatccactatacacaacattagccaaaagatggtccanaggttatacgataacagtagctgtaggtgtcgtgacaggtacaattataggtctacagttgtcattactatggccaacatttatgcaaatgggtggacatgttatagcattaccattattatggaaacatttgctttcttctttgaagcgatattcttgagtatatatctatatacatgggatcgttttaaaggaaaatggacgcactttttaattagtataccagttatccttggtggatcattctcggcgttctttattactgccgttaactcatttatgaatacacctgctggatttgaaatgaaaaatggcaaaatggttaatgtagaaccattagcagcaatgtttaatgattcgtttttaattagatcattccatgtggttgcaactgcacttatgacaatggcgtttgtattagcggctatcgctgctttcaaattactcaaaaataaatttaaaaaagatacagaatatcataaaaaagcactaaaactaactatgatcttaggtgttgtttttacattaggatctatgttagcaggtgacttatctgctaagttcttacatcaagagcaaccagagaaattagcagcttatgaatggcactttgatacggaatcacatgcagatttagttttatttggttccttagatgaaaaaacgcaagaagtaaatggcgcaattaaaattcctggtctccttagctttttagctgataataatactaatacagaagttaaaggtctggatgaatttccaaaagatttacaaccaccaatgattgtacattattactttgatctcatggtttcgatgggggtattttgtttagtcgtttccggtgcatatgtacttacacttatatttaaaaaactgcggaaatttacacattcaaaacctatgttatatggtgtactattgactggtccagcggctatgctagcaatcgagtttggttggttcttaacagagcaaggtcgtcagccatggattgttcgtggttatcttaaagtagcagatgctgcgacacaagcaggaggattaaccctagttacaattctattcggcttgttataccttgtgttaatggttacctctgcttatgtattaattcgtatgtttaaagagaaaccagcttataaagaagttgaagcactagcttcagaaagaggtgatgcataatgatattcgcatatattggcatttccgtactttggattttcttattctgttacatcattattgcatccatagattttggtgcaggtttctttacattacatgccaaaattacaaagcaagataagaaaataaatcatttaatagcacgttatttaaacccagtttgggaagtgacaaatgttttctttgtattcttctttgttggtgtggtaggttttttccctgacactgcaatgtattttggaacagtgttactattgccagcctctatcgctttaatattactgtctattagaggtgcattttatgcctttgaaaattatggcccagatagtaaattagtttggttagcaatgtatggtatcgctggtttattaataccagcatcacttgctacgacattaacgatttcagaaggtggatatatcactggaacagaaaataatttggatttaaattggacagagttattattaagtccatactcttggtcagtcgtattcttagcgattatctcagttctgtatatatcttcaggtttcttaacatattatgcttcgaaagcaaaagataaaccagcgtataacttattaagatattggttcttaatttggggcccaccaatgatagcaatttcattatttgtatttttatcattgcgtttacaaaatgaagcacacttcatcaatgcagtatctaattattggtggatattcttgttaagctttatttgttttattggtgcaatggtcttaacattaatgaaaaaaggacatggttacgcatttatattagtcattttacaaatgggatttgcatttttcggatatggtgcaagtaaattaccatatttactttatccgttcattcgtataaatgaacacgtagtaaatagtagtatggcaattgcgttaatcattgcttttattttaggtttacttttactgattccatcgttaatattaatattaagattatttgttttcgacaaaaaatatgtggaaggcaaaaaatagaagattttcaaatgtggttatgattgttctaaataatacttatgtggtgttgtttagaatggtcatgccacgatttttaaattggaggacacacatggataaagagtatgttgtaattggtttaggccgatttggcggtagtattgtaagagaattaaatgcgcttgatatggatgtaatggcaattgatatgaatgaagcacgtgtgaatgaatatagtgatattgcaacacatgctgtagttgctgacactacagacgaggcagttatgaagagtctgggcatgagaaattttgatcatgtgatcgttgcaattggtgaaaatattcaatcgagtaccttaacaacattaatcttaaaagaattaggtgtgaaaaaagttacagcaaaagctcaaaatgattatcacgctaaaattttaaataaaattggtgctgacacggtagtacacccagaaagagacatggggagaagaatcgcacataatgtagcaagtgccagtgttcttgattatttagaacttgcagatgagcattctatagtagaaattaaagctagtgaaaaaatggctggtcaaactataattcaattagatattcgtgcgcaatatggaataagtatcatagcgattaaaagaggtagagacattttagtatctccagatcctaatattagtattgaaataggagatattttaatcatgattggacacgataatgatttaaatcgttttgagaaaaaagtagtaagataacttatttaaaaatgaggcagcaatattaatatttttgattaaaaataaacgtcaatttctattgagatagtatagaaattgacgttttttgcatttatgaaaggtggtaaattagcgagatactatcttattttgttaatcacaatttgttgttaaagttattgttactattgtacttttttacattagtaattaaaatatataacccaatgattaacatcagtattggaagaactattattaaatatatagaaaatgcaccaaataaattagtaatcatcgctagtattagaatgatgagcataattaagatgactaaattcagactcaaagttttcgacatgataatcctcctatatacataaagtgattcatttactcaattttatataattatgattattaaaggtagtagagaagaaataacaactgataaattactgtttttaattacatatggtatgacaatagatgttaaaattgcccaagtaattaatatgataaatatataacttatctgtgtaaatcaaatacttctctttaaattaatgtcacatcacagttaatataacatagcataaatgctgttcatatattttaagttgtattaatgcttgttttttacagatgtgttgaataataaaatgagtaaatataaagcggcctaatccttaatgaggattaggccgcttactgtgagaatgaagatttaagtccattcctgtacttttttaagattctgaattttggttttgattcgattgttttggtttttcaacggattgattggctttatttgagccatttttattacttgatttttctacattttgttgattttttgatggtgattttgtgttgtttttcttcggtttcgtatttttgttacttggttttttagtggatgtttgattattatcttcattcactttcatgataactggtaatatcattggtttacgtgcagttttttcgaataaatagggttgtaatgtttcgataattgaagatttgatttggtgccattgaatatcttgattctgattcaacttaccaattacatccgttttgattctacgttgtgcatcataaatcaattgaccagattcacgcatatatacgaaacctcgtgaaataatatctggtcctgaaagaagtttattcgttttaaagtcaatacttactactactatgactaaaccttcttcagataaaagctttctatcacgaataacgacgttaccaatatcaccaataccactaccatcaactaaaacattgccagaaggaattctgccggcttttctagctgaatcatgtgttaatgctaaaacatcaccaatatcaaagataaagacattgtcaggatcaacaccacattcgatacctgattgaccgtgtgcttttagcatacgatactcaccatgaattggtaagaaaaatttaggacgtagtaggcgaagcattaattgttgatcgcctttagaaccatgaccagaagtatgaatgttagatactttattatgaataacctcggcacctgcacggtaaagggaattaatcgtacgattaatgctctttgtatttcctggaataggtgaagagctaaacacgacagtgtcttctggaataattttgatttgtttatgtgtaccattggcaattcttgataaagctgccattggctcaccttgtgaaccagtacataaaattaataattcatgttttggaacagtgtttattttgttaggttccacaaatgtttctggtggtgctttgatgtaacctaattccataccaattttaatattgttttccattgaacgaccgaatgtaacgattttacgattatgtttaattgcagcttcaacagcttgttgaactctgtaaatgtttgaagcaaatgtcgcgaaaataatacgtccactgcaattgcggaagattttttcaacattttgtccaacttcacgttcacttaaagtgaaatctggaacgagtgaatttgttgaatctgaaagtaaacaaagtacgccttcttcaccaagctttgccatttttgcaatgtttgctggttctccaactggtgtgaagtcaaatttgaaatctccagtatgcacaatattaccttctggtgtatttacgataacaccataggcttctggaatactgtgtgttgttagatagaaagatacttcaaaatgcttcgatttaataacgctactttcatcaatttcaattaattctgtagttcttaataaatgatgttcttctaatttgtttctaatcaaacctaaagctaatggaccgccatatataggtacattaatttgctttaataggtagggcacaccacctatatggtcttcatgtccgtgagtaataaacagacctacaattttatcttggttttgttctaggtatgtgatatcaggaataacataatcgatacctaataaattatcgtcagggaatttaatacctgcatcaataataacgatttcatcctgatactcaacagcgtaggtatttttaccgatttcacctaaaccaccaagtgcgtataccgcaacttcatttttgtggatttgtttcattattcagcttgctccacgttgaagtgatcagattgtttttcatattctaaatgtgcgccctctaatttagcaataaattcaatattaaaattacgatccttcaaatatcttctaacttgttcttcagtttgtgcttcaacataaatagtttgtgtgtgttcacgtacgattacttcttctttattatgttgataaaatactttaaatactgccattttatatatttcctcctaaaaatcatgtgttgattttataattatttttattgtaataccctagcactttgtatatatgaaaaagatgagactacttttataaaacgagctctgtttttcataaatagtgttattactaccatctataattagaacgtactagtattgtctggtaagtttttagggtgattttcagttcgttcgaatagaaaaacacaaatactttaatttgtatgttttcagttatttctcattttacatgatgtagtggaataaataaagcagttttatcacaagagaaaactatttaatagtacaagttacttcttatttaaattacatattaaaaattactgaaattaaatacagaaaattttgaaaaaacaacataaaaacttgagtagtatataaaaattaattaagataaagaagtatcttaaagggaaagttaagtacaatatattaagtatgatacataagtaaatatttgaggtggaccatttgaacaatgtaaagagaatagtagaagatgtaaaaaaggaaaaagtgcgtacggataaaatatttaaggatatcacttttgaagtacgtgctgagcaagttatcatgttttttaattataatgaaattattgatacagtgaatgaggatcaaaattatgttaaacataaccacgatccagagtttattgatattcagcaattaactgaattaaaggctgagtttaaagagctagatattccatttcatgagcgaagagatgatttcatgtaattcatagatataacaatgaaagaatatgatattgttaataatttatttgtaaaatgtttgataaccaagttaaatacgatgttaagtatacattgccaaagttaaaaagtttaaaaataaaaagagctaatccgactgcggattagctcttttagtttgagcatggttatttatgaaccaaactcttgtttataatatgttttaatcaaatagattaaacttctacagcatcattatgtggctgaagtggattatttggatctatatgatcatagaacatgatgccgttgatatggtcaatttcatgttgaaccacaacagcagggtaacctttcaagcgcaatttaacttcttttccatcgatatctgtagctttaacagtaattctatttttacgatgaactaatcctggaatgttttcatctacgcttaggcaaccttcacctgtaggaagatacgcttcttgaatactgtggctcatgatttttggattaactaacatcaaatcatatgacttgccatttccgtcatcagggagataaacggcaatcattttttttgaaatattaatttgtggcgcggcaagacccacgcctgagcgcaaaccatatttagtagcaatttcatcatcttgactattaattaaaaattcacgcatagccaataacgtattacgatcttcttcagaaagcggtaaagtaacatcttttgctttttcacgaagagtaggatgtccatcacggataatatctttcatagttaacatttgttcatacaccttccttaatataaaatataccaaagtttcatagataaaatacagtagttagatttgatttattataaaatattatataacattacaagcacataaaggaggatttttcaaaatgaaattaaaatatggcatcagtgcagtcattgcttctacagtattagttgcaggttgtacaacagataaaggtgaaatcaaagattacaacgaacaagttcaaaaagcttttgatgaagaaaagcctgtatcatctgtagggaagaaattaaatagtttagaacaagacaaacaaaaattagtgaaaaaaatcaacggtaaagaccaacaagaagtacaagaaacttctaaaaaagttgtagataatgtagaacaaagagaaaaagaattcggaaaagaagaaaaagccataaataattctgaagaaaaattcaaaaaagcggaaaaacatttagataatattagcgacaaagcgaagaaaaaagaagttaaacaactaaatgatgcacttaaagaaaaatataaggcacatgatgaatatgcaaaagcctataagaatatcatgaataaagaaaaagatatgtttgaatatactgctgacgatcaagtagaacaatctcaaattgataaaaaatctgaggcagtatcaaaatcatataaagatatgaataaagccttcaaaaagtattcagatacaatgaataaagtgaataaagaaaaagaagatgtagatagcctagcttaattcaaaaaagcgagtcatttgaaattataatatggaagatatagtataagtattggttgcgcttacattcaaatggaaatgctcaacgatagacatacaaggactggtaatacagttgtaataatttcattagtacagttgcgaaactgtacctgttttaattactacagaactttttcaaattgtttaactgcataaaagttttgtggtacaatgtttaagaataaaatgaatttctattatacgggaaaggtttggtgaattgaatggctccgaaattaaaagcccaattcgatgcagagaaagtattgaatgatactcaatctcaatttgaaatgattcaaattttggatgaagatggtaacgtcgttaacgaagatttattaccagatttgtcagacgagcagttagttgaattaatggagagaatggtttggacacgtatccttgatcaacgttctatttcattaaatagacaaggtagattaggtttctacgctccaacagcaggacaagaagcttcacaattagcttctcaatacgctttagaacaagaagattttattttaccaggttaccgtgatgtaccacaattaatctggcaaggattacctttaactgaagctttcttattctcaagaggtcactttaaaggtaacagaatgcctgaaggcgttaatgcgttaagcccacaaattattattggtgcacagtatgtacaaactgctggtgtagcattaggtattaaaaaacgtggtaagcaagctgtagcaattacttatactggtgatggtggttcttcacaaggtgatttctacgaaggtattaactttgcttctgcttataaagcacctgcaatttttgtaatccaaaataacaactatgctatctctacacctcgtagtaaacaaacagcggcaactactttagctcaaaaagcaattgcttgtggtatcccaggtttacaagttgatggtatggatgcattagctgtataccaagcgacaaaagaagcgcgtgaccgtgctgttaatggtgatggtccaacattaattgaaacaattacttaccgttatggtcctcatactatggctggtgacgatccaactaaatacagaacttcagatgaagattctgaatgggagaaaaaggatccattagttcgttatagaaaattccttgaagctaaaggtctatggactgaagaaaaagaaaacgaagtaatcgaacgtgcgaaaactgatattaaagctgctatcaaagaagcagataatacagaaaaacaaactgttattgacttgatggaaaatatgtacgaagaaatgcctcaaaatttagcagagcaatatgaaatttataaagagaaggagtcgaagtaaccgatggcacaaatgacaatggtacaagcgattaacaacgcgcttaaaaccgaattacaaaacgatgaaaatgttttacttttcggtgaagacgtcggtgttaacggtggtgttttccgtgtaactgaaggtttacaaaaagaattcggtgaagatcgtgtattcgatacacctttagcggaatctggtattggtggtttagctttaggtttaactactcaaggataccgtccagttatggaaatacaattcttaggattcgtatttgaagtattcgactctgtagcaggacaattagcgcgtacgcgtttccgttctggtaactctaaacaagcaccagtaacaattcgtgctccatttggtggcggtgtacatacacctgaattacacgctgataacttagaaggtatcttagcgcaatcacctggtctaagtgttgtaattccttctaatccttacgatgctaaaggtttattaatttctgcaatcagaagtaacgacccagttgtttacttagagcatatgaaattatatcgttcattccgtgacgaagtacctgaagaagagtatacaatcgaaattggtaaagcgaacgttaaacaagaaggtaatgatattacactaattgcttatggtgcgatggtacaagaatcattaaaagcagcagaagaattagaaaaagaaggttattcagtagaagtcattgacttacgtactgtacaaccaatcgacattgaaacacttgttgcttcagttgaaaaaactggacgtgctgtagtagttcaagaagcgcaacgtcaagctggtgttggtgcagcagttgcttctgaattagcagaacgtgcaattctttcattagatgctccaatcgctcgtgttgcagcagcagacacggtttatccgtttacgcaagctgaaaatgtttggttaccaaacaaaaacgatattgttgaaaaagcaaaagcaacattagaattttaataatcactgataagaagtagcgtatacgataagtcgatatacctacttcattcaggtttatatataagcatgagatttgagttgtttagcgcattctcaatttctaatttttgacttaatatgaaattttaggaggataataacgtggcatttgaatttaaattacccgacattggtgaaggtatccacgaaggtgaaattgtaaagtggtttgttaaagctggagatacaattgaagaagatgatgtattagctgaagttcaaaacgacaaatcagttgttgaaattccatcacctgtttcaggtactatcgaagaagtattagtagatgaaggtactgtagcagttgttggtgatacaattgttaaaattgatgcacctgatgcagaagacatgcaatttaaaggtagcgaaagtgacgaggcttcaagcgagtcaacagaagctcctgttgaagaaagcactaaagaagaagcatcagcacctgctcaatcttcaaatgatgaagaagtagatgaaagtaaacgtgttaaagcaatgccgtcagttcgtaaatacgcacgtgaaaatggtgttaacattaaagctgtttcaggttcaggtaaaaacggacgtacgactaaagaagacgttgatgcttacttaaatggtggacaagcaacagcttcaaatgaaagtgcagtagcaactagcgaagaaactacaagttctgcacaatcagcagcagtttctacagaaggggaatacccagaaactactgaaaaaatacctgcaatgcgtaaagcaattgctaaagcaatggttaactcaaaacatactgcacctcacgtaacattgatggatgaaattgatgtgcaagaattatgggatcaccgtaaaaaattcaaagaagttgcagctgaacaaggtactaaattaactttcttaccttacgttgtcaaagcacttgtgtctgcacttaaaaaatacccagcacttaatacttcatttaatgaagaagctggtgaaatcgtgcataaacattactggaatatcggtattgcagctgacactgacagaggtttactcgtaccagtagttaaaaatgctgatcgcaaatctatgtttgcaatttcagacgaaattaatgaacttgctgtcaaagcacgtgatggtaaattatcagctgatgaaatgaaaggtgctacttgtacaattagtaacatcggttcagcaggtggacaatggttcacaccagttatcaatcacccagaagttgctatcttaggtattggtcgtattgcgcaaaaacctatcgtaaaagatggagaaattgttgcggcaccagtattatcattatcactaagctttgaccatagacaaattgatggtgcaactggtcaaaacgctatgaatcatattaaacgtttattaaataatccagaattattattaatggaggggtaaaacatggtagttggagatttcccaattgaaacagatactattgtaatcggagcaggacctgggggctatgttgcagcaatacgtgcagcacagttaggtcaaaaagtaacaatcgtagaaaaaggcgaacttggtggcgtatgtcttaatgtaggatgtattccttcaaaagcgttattacacgcttcgcatcgttatgatgaaactaaaaactctgaaaatttaggtgttattgctgaaagtgtttcacttaaatttgataaagttcaagaattcaaacaatcagttgttaaaaaattaactggtggtgttgaaggactattaaaaggtaataaagttgaaatcgtaaaaggcgaagcttactttgttgataataatagcctacgtgttatggacgagaaaagtgctcaaacttacaacttcaaacacgcgattattgcaactggttctagaccaattgaaatccctaacttcaagtttggtgaccgtgtaattgattcaactggcgctttaaatttacaagatgtacctggtaaattagttgtcgttggtggcggttatattggttctgaattaggtactgcatttgctaactttggttctgaagtaactattttagaaggtgctaaagatatcttaggcggtttcgaaaaacaaatgacgcaacctgttaaaaaaggtatgaaagaaaaaggcgttgaaattgttactgaagcaatggcgaaatcagctgaagaaacagacaatggtgttaaagtgacttatgaagtaaaaggtgaagaacaaacaatcgacgctgattacgtattagttactgttggacgtcgtccaaacactgacgaattaggcttagaagaattaggtcttaaattcgcagatcgcggtttattagaagtagataaacaaagccgtacatcagttgaaaacatctttgcaattggcgatatcgtaccaggtttaccacttgcacataaagcaagttatgaagctaaagtagctgcagaagttattgctggagaagcatcagaagtagactacattggtatgcctgctgtatgtttcactgaaccagaattagcgacagttggttatacagaagctcaagctaaagaagaaggtttagcagttactgcttctaaattcccttatgcagctaatggtcgtgcgttatcattagatgatacaactggatttgttaaattgttaacacttaaagaagataatacattagtaggtgctcaagtagtaggtactggggcttctgatattatttctgaattaggtttagcaattgaatcaggtatgaatgctgaagatttagcattaactattcatgctcacccaacattaggtgaaatgtctatggaagctgctgaaaaagcattaggattacctatccacactatgtaattataagtaatttcatataaatttaattgggactgggacatcgatgaatgtctcagtctcatttgcttttatagatatagatagcaatatcgagtagttaataaaataatagaatagtatgattacaggtttattaagtaaaatcttttactgttccattttatttatacataaagcatagcaaacataaattgaggtttatcataatttgaatgaaagggtgttaaaatctatggagtaccaatatcccattgatttagattggtcaaatgatgaaatgatgcaagttgtttctttctttaatgcagtagaatcctattatgaatcaagtgtagaaggagaaaaattgttagatcgctacaaacaatttaaaaaaatcgttccaggtaaagccgaggaaaaacaaatttttaaagaatttgaaaatagtagtggctatagcagttatcatgcagtgaaagcagttcaatcatcaccagatcaaaaattattttcagcaaaaagtaaataagtattgtcttcatcgttatattttgatatttttattaagcattaaacaaaatgtttgataaatataaacagcatataacgattttttaattttacataatagcattagattcaattttgaaaattacgaaaaggtgacaatatggaaattggaaagaaaattaaaaatttaagaaatataaaaaagttaacgcaagaagaattggcagaaagaacagatctttcaaaaggttatatttcacaaattgaaagtcaatatgcatcaccaagtatggaaacatttttgaatatattagaagtacttggcacaagtccgagtgattttttcaaagaacctaaatctgaaaaagtattatataaaaaagcaacacaaatcacatacgatgaatatgataaaggttatattttgaactggccagtcagccaatcaaacgaatttgatatggaaccattgatattaactttaagagcgaatgcatcatataaaaattttggaccatctgaatctgataccttcatatattgcttaaaaggtgaagtagtactcatgttgggtaatcaaaattattatgcaacaactggtgacgcgctttattttaaagcgaaccaaatacatagactagaaaatcaaacagcggatgaagtacaagtaatgattgttgttacagcttcatatctataggaggacacgcgtatggaaccattattatcatttaaatctgtaagtaagcagtatgatgatatgcagatattagacaaaatagatatagatattgaatcaggatatttttatacattactagggccatcaggttgtggtaagacaacgatattaaaattaattgcaggttttgaagaagctgataatggtgacattatttatcaaggtaaatcaattaatcatttatcagcgaataaaagaaaagttaatactgtgttccaagattatgcgttattccctcacttaaatgtctatgacaatatcgcttttgggctaaaattaaaaaaattagctaaatcagaaatcaaacgaaaagtacatgaagcattgaagttagtgaaactggaaggttatgaatcaagaacgatagagggcattagtggtggacaaaaacaacgtattgcaatagcaagagcaattgtcaatgagcctgaaattttattgttagatgaatctctatctgctttggatttaaaattaagaactgaaatgcagtatgaacttagagaaatacaatctcgattaggcattacatttatttttgttacacatgatcaagaagaagcattagcgcttagtgattatatatttgtgatgaaagatggtaaaatccaacaatttggtacgccaattgatatttatgatgaaccagtcaatcgttttgttgctgattttatcggtgaatcaaatatcgtagaaggtaagatggttaaagattacttagtgaatatctatgggcaagattttgaatgtgtagatatgggtatacctgagcaaaagaaagttgaaattgtgattcgtcctgaagatatttcattgatagatgcaaaaagtggactgtttgaagttactgtagattctatgttatttcgaggcgtgcattatgaaataaattgtattgatagaaaaggctatgaatggatgattcattcaactaaaaaagcagaagtaggtagtaaagtaggtttatacttcgatcctgaagcaattcatattatggttcctggtgagacagaagaagaatttgataaacgaattgaaagttacgaggaacaagacaatgcgtaaactgaatcgatttctctttatcccatatgtattatggatgatattatttattattgtacctgtgttattacttgtttatttttcactatttgatattcagggtcatttcagttttgaaaattataaacaaatgttttcgtggaaatactttagcatgatttgggattcagttatttttgcagctgtcattactatcattacattgttcattagttatccagctgcttattttatacgaaattcaaaatatcaaaatttatggttaatgatactcattattccaacttggattaatttacttctaaagacctatgcatttatagggttattgagtcatgatggtgttatcaatcaaatgttaaatttattacatttacctaaaatggatttattatttactgtacctgcatttatacttgttgccagttatatttatataccatttatgattttacccattttcaatagtatgaaagacatccctaataacattttacaagcctctagtgatttaggtgctagtccgtttacgactttccgaaaaatcatcttaccacttacaaaacaaggtgtgttaacaggggttcaagtgacatttattccagcattatcgttatttatgataacaaggttaattgctggaaataaagtgattaacataggaactgcgatagaggaacaatttctagtgattcaaaactacggcatgggttccactatagcattatgtttgattctctttatggcgttagtgttaatcattacgaatactaaatctacaaatggaaaagggtgagtcatatgaaatggtacggtaaattataccttggtatattaattgcaatattgtatattccaattttatttttaatggtatattcatttaattctgctgggaatatgattcattttgagcatttcactttggaacattatcaatccttgtttagtaatgatcgtctaatgtcagttatatttaatacgattgctgttgccttgttagcggcggcttttgctactgtgatcggtacaatgggagcaattggtttataccatttgcgaaataaaaaattaaaagtttcattgttgacgctcaataatgtattaatggtatcttctgatgtagtgattggtgcttcgtttttgattatgtttacagccattggccattttactggtttaggtttaggatttttaacggtgctcatttctcacattgcattttgtataccaattgttgtgattattgtattgcctaaattatatgaaatgaatgatcatacattaaatgcagcacgtgatcttggagcgactgaattgcaagtattaaacaaagtcatgttacctcatttaatgcccgcagttattggtggtttttttatggcgcttacctattcacttgatgacttcacagtaagtttctttgttactggtaatggttttagtgtactatctgtagaagtatacgccatggcaagaaaaggaataagtatggaaattaatgcgatttctactatattattcttagttatcatgctgggtatattagcttattatttaattcagaacacgctaaaacacaaaaaacatagcaaaagaggtgtgcaacaatgaaacgatttttacaattaattataatttcaattgttgttggcgtgatttgtttacttataagtcaaaagttcacatctaaagaccattctgcgagtggtgaaaaaatatatgtctataactggggagagtatatcgatcctagtttgataaaaaaattccaaaaagaaacgggtattgaagtagtttatgaaacatttgattctaatgaagcaatggaagcaaaaatacggaatggtggcacaaattatgatgttgcttttccaagtgaatatactgttcaaaaattaaaaaaagagaatttgttattgccgctaaatcatgagaaaataccaaatatgaagaatttagattcagattatatgaatatgtcatttgatcaaggtaatcgatactctgttccttatttctttggcacagtaggaattctttataataaaaaagcttatccgaatgatcatttcgattcttggaagcaactatatgataaaaagtataacaatgatgtactcttggttgatggtgctagagaagccataggtttagccttgaataaattaggctacagtttaaatgatacaaattcacaacatttagcagaagctgaaaaaacattatcacacctaggacccaatgttaaaggtgttgtaggtgatgaaataacgatgatgttagagcaacatgaagcaaatgttgcggttgtatggagtggcgtagcagcacctatggtacaaggtagtgatgaatttaactatgttgtaccgaaagaaggatctaatctttggttcgataatatggtgatgcctaagacagcacaaaataaagcgggcgcctataaatttatgaactttctattagacgaagaaattagcaagcaaaatactgaatgggttggttatgcttcacataataaagcagcaagagagaaattaccagatgaagttaaaaatgataagcgtttttatcctacacagcaagaccaaaacagactggaagtttataaagatttaggtaaagaaacattaagcgaatataatgagcgatttttaaattttaaaatctccttgaaataaggcgtagttagtagttattttgccattaattcgctataatagtttgacaagcaatataaggagttgtaaaaatatgtcaggagagcaatatactcaagttagacgaccagtgagtcgactagcagaaaaagtattaggttggttaagttgggtattcttattactactaaccgtaattacgatgtttattgcactagtatcttttagtagtgaaacatcaatacaaaatttagaaacaacgctaaatggtaatgactttgttcaacaaattctagcaaataatagtttgaatacgacacaatttgttatttggctacaaaatggtgtatgggcagtcattgtatactttatcgtatgtttactgttatcattcttagcactgatatctatgaatattagaatcttatcagggttcttatttttattggctacggttataacattaccgctcgtattattatttgtaccacttatcataccaattctatttttaatcgttgcaatcatgatgtttgctcgaaaagacaaagtagaaacagtacctgcatattatactgaaggttatagaggtcattattctgattatgatcaaccgtcagaaccagaaccacaacctcaatattatgagaaacaacaaactgctgatgttgaacaacctactaatgatgattcgttaagaagagggggctattcatctgaagttgctaataaagtaaatggtaaaaatgatgcgactgaagaggaacctcaagttctatcaagacaagaaaaatacaactataagcagaaaaaacaaaatgagacgcaagcagatgcgcaaaatgtggaagatgattttggtaatgtgagtgatgtgtatgatgaatctggtgaatacgtatctaagcataaccaagaagatgaagcagctgcagcacaacgtagacaagaagaacatgaagcggagcaacgtcgtcaacaagctgagtatgaagaacaacaacgtcgacaacaagctgaggccgaagaagcggcgcgattaaaacaagaaaaagctgaagaaaaaatgcgtgttaagcaagagaagaaagaacgtaagaaacgcgaaaaagaaagacgcaaacaacagccgagcgcagttagtcaacgcagacaaaattttgaagaacgcaaaaagatgacgtctcatgaaactgaaaaagatcaacaagataaatcgtaataagagacgatgcttaataaaaaagatgagcgaggacataaagtgtacctcgctcatcttttttatgtttatcttttacataaaatattcattttagttatatacaataatgctatatattataactcttggaatgtttgaataattaggtaaatatttagaatgctaagtataatgattaaacaccatgatatgatatttacccataatttatttttaaattgtcccattaaacgtttgtcattcgttgataattgaagtggaatgagtgaaaatggtaaagctaaacttaaaaatacttgtgaaaatactaataattgttccatttttgcttcattactattaaagacgattaaacagataatgataggtaatatcgcaattaaacgtgtaatcaatcttcgtaaccaatttggtatttttaaatttataaaaccttccatgacgatttgacctgccattgttccagttattgtagaattttgacctgacgcaagcagtgcgattgcaaataaagtactcataattgcacctaacgacgcgcctaataatggttgattctgtaatgcattatataaatcatagaatccacctaattgctctgtatttacaccaaagaaaagcgctgcccctaatactagtaataaacaattcacgatgaatgcaattgataattgtatatttgagtccattgttgcatatttgattgcgtgtgcttttgattgtatgctattgcgatcatacatacgtgattgaacgattgatgaatgtaaatataatttgtgcggcataattgtcgctcccgataatacctaattgcacaaaagagtgcaccattatctgtaataattgttgaactcggaacaaaaccatttaatacttcagtaacgtgaggtgatgcaataaatacctcgaaaacaaaaataacaagtactgtgaatataagtgttcccacaattgcttcgatttttctaaaaccaaagcgcataataaatagtaataagaaaacatcaaatactgtgattaacgcgcctacaagaagcggaataccaaataataaatctaaggcaatggcactacctataacttctgctatatctgtcgcgataattgctaactcagcaatgatccaaaatacaaatgcaacgggtttatttaaatagtgtttagtagcctgagctaagtccatacctgttgatattcctaaccttattgtcatactttgtaataacattgctgacagactagaaagtaaaatcacgaatagcaaaatgtatccaaactgcgcgccaccttgcatagaagtaatccaattacctggatccatatagccaacagcgactaataaacctggccctaaaaatgaaaataatttttggctaaatttgccatgagtattgatggaaaccgtattattaatttcatctaaactcttattatgggtttgaacatgatttttcaatacccccacctccatattaatttattaacattttatagattactccaaaataattattaggtcaacctaaaaatacatagagaataaatttcttggctacattaaattttgaataggggctattgattaattagtttgatcattatacgagatgatttttaattaaatgcaattttgatatgatagaggaaagtataatctaaggaggaagtcgatgaataggaaacctgaacgtatcatggcgtggattgcaaatggtcttagtatactgtttctattattaatggttctagtcttttcatttatgaatgtaccagaatttaaagaggcatttcatcaaatgaatcagcaacaaggactagaaatgtcgatggaaacatttaaaacatctattatgtttcaaggcgttttattaattatttctacgatacttggtatattgggaacttttattatcaaaggaaatcgtgtgttggctgcttgtgtttttataattgcagcaatcactagtatattttccgggaattttgttgcgctcattttgtggtttattgttggtatcatgttattcgtcaaaaaggataagcgctttgaccatcacaaaggtattgtttcaaacgataacgctaatgatacgcataatgccaatcgaactgaggacatggatccagatcgtgaaatgaaacagaagaaagataatgacccttatatttattaagtatcattaggcaacatacaaaatatcatgatttaaatctgtgttaataaatagcgtgataacgcaaaaaaacaactgacctcatacattgtcgtaccttcataaatgagttatataactcatttatgaaggtgacattagaatcgtataggtcagttgtttttatttataaaattttaacagttgttcaaacgtttcttctaagaaagataggaaagctttatcatttttaaggtgttctgaatttggtgacaaagtacgagcaacgaaaaattcaccttttttcacttctttaacgcgcctaaacgctttgaataaatcttcgtcagtcatattgtggatatacgttttttcttgactcatatggtctaaactcacgctataatctgagggtaaatttctcaatgcatcgaattgatctacaaaagcttgtacttgttgcgctttatccttggcttcatgcatcacaccatacataacgaacaattgattttcaaataggcctatttgaaaatgtggttgcattttataaccacgattatttgttgcaaaagcgacccaagtatctttgggtggattgacacttctacgtgcatgtttagcaacatgtggatagaaaatttcgccagtagcagtttccaagtattgtgcgaagtagtcacccaaatgatttaattgtggtctaacgcgttcgttgagtgcttccattcttgcatcaagaccatcaacagtgaatgctttaaaattcttaggtttaaatgtatatttagtcatttggtcctcctataatcattctatacgtttgtattgtagcataatataaacattgaaacatttgctttgctctatacccttatgatactgaataagtgatatctagtgcgtgtatacaacgagtaaaaagggtaattataatagataaatcatacttagatgaaatttaatgcttgattattgaagtatttaataaattgttggctaatatctttttaagtattaactaatgtataataaatagtgaacaaggagctgatacaatgactgtttatgaatttgcaaaaggccttatattagaagcaggaatcaatgtaaaaaaaataatgaaacaagacattaagattgagacaaaatcaaatcctaatgatctagtgacgaatgtggataaagctacggagaaatatctttttgataacatcaagcaaacatacccgaatcatttagttataggtgaagaaggacatggacatgagctgaaagacgaggcaggggtagtttgggttatcgatccaattgatggtacgttgaattttgtacatcagcaagaaaattttgcaatttcaatcggtatctataatgatgggaaaccatatgctggctttgtttatgacgttatgaacgatgtattatatcatgctaaaacgggtgaaggcgcatatgaaaacggtaatttgttaccagcaatttcttccacacaactaaaaacgagtattattggtatcaatcccaattggctaactaaaccacgcttaggtgaaatgtttaaacccatcgtaaatgaagcaaggagcgcgcgtgcctatggttctgcagcgttagaaatcatacacgtggcaactggtaaattaggtgcatatatgacacctagattacaaccatgggattttgcaggtggtttgattatcttaaatgaagtggggggcgtcggcacaaacttattaggagaacccttatccatatatgaaccgagttcgattataatggcaaataaggatttacattcagagttaatagataaccatttcaaaaaaaattatgaaatagttcaattattacagcaaaaattaaaagctaaaaatgattagctaaatcgatttttaaaaataaaaaagcgtctcactcctacttagaagagtgagacgtatttatgaatatatgttaaatcaacatgaaattatagccaatcattttcacgatatttcttctttaacgtgaaaccgtaaccaaatgttgcaatgaataatataaatgttaaaatcatgaatggaacatttgtagcagctaaactgaagctaaataaaagtaaaaatattatagcaaccacagcgagtacccaaaatattgcttttgattttttttgttgcatccctaccacacctttatagttttctttaaccaattatatgatataataaaaaagttgcaaagaaaagtgggaatttactcgagaaaggaaattgtataaaaatgactaaaataagagaagatgttcgtaatatagctatcattgctcacgttgaccatggtaaaacgacacttgtagacgaattgttaaaacaatcaggaattttccgtgagaatgagcacgtagacgaaagagcaatggattcaaatgatattgaaagagaacgtggtatcactatccttgcgaaaaatacagcagtaaattacaaagataatcgaattaatatattagatacaccaggacatgctgacttcggtggagaagtagaacgtatcatgaaaatggttgatggtgttgttttagtagtagatgcatatgaaggtacaatgcctcaaacacgctttgttttgaaaaaagcattagaacaaaacttgaaaccagttgtagttgtaaataaaattgacaaaccagaagctagacctgaaggtgtagttgatgaagttttagacttattgattgaattagaagcaaacgatgaacaacttgatttcccagttgtatatgcttcagcagtgaatggtactgcaagtttagatccagaaaaacaagatgaaaacatgcaatcattgtatgaaacaatcattgattatgtaccagctcctgtagataatagagatgagccacttcaattccaaacagcactattagactatagtgactatttaggacgtattggtgttggtcgtgtatttagaggaacaatgcgtgtcggtgacaatgtatcattgattaaattagacggatcaattaaaaacttccgtgtaacaaaaatctttggtttcttcggtttgaaacgtgaagaagttaatgaagcatatgctggggacctaattgctgtatcaggaatggaagatattaacgttggtgaaacagtaacgccaactgataaccaagaggcattaccagtattaagaattgatgaaccaacactagaaatgactttcagagtaaacaattctccattcgcaggtcgtgaaggtgattacgtgacttcacgtcaaattcaagaacgtttagatcaacaattagaaacagacgtttctttaaaagttacacaaactgaatctccagataaatggattgttgcaggtcgtggtgaattacacttatctatattaattgaaaatatgagacgtgaaggtttcgaattacaagtttctaaaccacaagttatcttaagagaaattgatggcgtacaatgtgagccatttgaacgtgtacaatgtgaagtaccacaagaatatacaggtgctgtgattgaatcattaggacaacgtaaaggtgaaatgttagacatggtcactacagacaatggcttaacacgtattatctttatggtaccagcgcgtggattaatcggttatactactgaatttatgtctcaaacacgtggttatggtattattaaccatacatttgaagaatttaaaccacgtgttaaaggccgtatcggtggtagaagaaatggcgcattagtatcattagatcaaggtaaagcaagttcatatgcacttatgggcttagaagaccgtggtgtaaactttatggaaccaggtactgaagtttatgaaggtatggttgttggtgaacataaccgtgaaaatgacttaacagttaatgtaacgaaagagaaaaaccaaactaacgtacgttcttctaataaagaccaaacagttacaatgaaacgtccaagaacgttaacacttgaagaagctttacaatttattaatgacgatgaacttgtagaagctacgccagaaaacatccgtattagaaaaacagtattagagaaaaatgcacgtgaaaaagaagcgaaacgtattaaacaattaatgcaagaagatgaataataaaacgtttttttctaaaacattttaatttcaatataagaggactcattcgtattaaggatgagtcttctttatatttaaaatattattattttaaccatctcaggcttgtaagatagacgagcttatagtctcacacgcttactattgctctgggcgccagcaagttatgttatgattcaaaatacgtatattaatattcaaaaaataaaggcacctcattttaaaattaccattaaataatttaaaaatgaggtgccttattaattagagacatttatgtcacggatgctttattgggttgttagtatattattatcaaattttaagaaacgttttaatacatatttaactgtttaacgatgattatacgttgtatcttgattacgttgttttggtgtatcaagtctacttttacattcatcacacataaacgtatgcattggatcgttacgtaatcttttggcttctaatgtattttgatctatgaacacttccgtatcacaaatgatacatttcactttcttcataactagatcacctctataccagtaacatattgaaactgataagaatatccttcttcaggaatataaacaaagctatcaacagaataatcctcatataatcttttaccatctttggcgaattggaaaaagaggtaaggtaacaagtcgattggtatttcaattgactcattatcattaaacaaacgtattgtggttgcattatcatgaggttcagcatttttgaaaaatggtgtcatattgataacaaaagatttttctaatactgcgcgtcttttatatttaatttctgaatttagagttggcggattcgtttgaccttctagaatggctctattccattcgcgattatcgtcaaaattgattggctttgtgccgtcaaaaacgccttgttctaaatcttcaatttgtacttttctgtcatcaaaaatccaagtcgtactatctagcgtaattggaaatttaacttcacccttaatttgaatcataatcccactcctattggcataaattacaaatatctataatcattttattgaaaaaattttagtgataaaaatgacttttttgtgaacaaaacacttatctatgttacatttaattcaagtttagcagagctaaaaaataaaaatcattaaaccgttttcaagtaatggcctgtataaaggcacattgattataaataagagtaaattaaattatcgttactattaatattatcacaaattagacagtaacgtatattcttgaattcacttgctttttactatttagtaagatacactcttcttataaagttacaattgatagggggagtatgtcttggaaaaaaatcaaaaaattaacaatgcggcatatgaccaattgaataaagatgctgataggattctccaacttattaaagtacaaatggataatcttacattacctcaatgcccattatatgaagaagtacttgatacacaaatgtttggattacaaaaagaagtggattttgctgtacaacttggtttagttgacagagaagtgggcaaagatttaatgcttcgtttagaaaaagaactttctaaattgcatgatgcatttactaatgtttaatttggttacagtaggtagatttatttctggaaacataagattccaaaattgatatataaacttatataggaatttattatttaaaactacataagtattgtgaaagtggctgggacatcaatcatttgttgatcatttcttagccacttttgtcgtgctttaaaaaaataactcaacaataaaataaaataaaataatgattattagtgttatatttgctcgagaaattgttacaatgtttgatataatgttaaaagtaaaatttatttttatcaaacgattaccgtaaaaggattacggatgattcaaatcacttttattaaatacagttatcgaattaacaaatagaatattaaaaattagaattggatgatatgtcatatgaataacataaaacggttttttcgatatataagtaaaaatgccaaatatatcgattatccactcgtagttacatatttattattatgtctaattggtttggttatggtatatagtgcaagtatggttgctgctacaaaaggatcgttgacaggtggcatatccgtaccaggtacgtacttttatacaagacaattaatgtacgtgataatgagtttagttatagtatttttcatggcattcttcatgaatgttaaattattagaaacaattagatttcaaaaatggatgatgattggcatcattattttacttgctgcaacactagttgttggtagtaatatcaatggttccaaaagttggattaatttaggttttatgaatttacaagcttctgaattgttgaaaattgcaatcatcttatatattccttacatgattgaaaagaaacgaccaaaagtatttaaacagccaaaattaatgacttcaccaattattttagcaggattgtgtatcgcattagtgctgttacagcgcgatgtcggacaaacgttattgattatgattatattcgtttcaatacttttctatgctggtattggtgtccaaaagtccattaaatacggtctgttaattatagtaggtgtcgttattattggctcgctcttcttaattattggtttagtaccagattacttaacagcgagatttagtacgttaacaaatccatttagccaagaatcaggtacggggtatcatatttctaattccctaattgccatcgggaatggtggcttgctaggtagaggcctaggcaacagtatcatgaaattaggttatttgcctgaaccacatacagattttattttttctattatatgtgaagaattaggtttagtaggtggccttgtagtcatttgtttactattctttatcgtctatagagcctttgagttagctaataagacaaattcttatttttataaactcgtatgtgttggtgtagctagttatataggaagtcaaactttcgttaatttaggtggtatttcaggtacaattcctttaacaggggtgccattaccatttatcagttttggtggttcatctatgattagtttaagtatcgctttaggtttattacttattaccggtaaacaaataagaatagaagcttatagaaaaaaacaagcgaataagaaaaagactcatatcggaatgactagacggtattaataaaaaactaaattaaatgtttaataatcagtaaaaggatttaaagacaaacgtttcaacttttaatagttgaaatgtttgtctatttttttacaatttaaacctaattttgaaatactttttacagatagatataatgataataaaaagttatcaatagtaataactttttattaattgtaatacgtgatataattttcttctaagcttgttatagtaaggctttcgattcattcggaagaagtacatttaaattataaaaattttacaatttaacatcttataaatagtttcaagataaaacttaataatttattactgtatacattgttcgtattttgctataatgaaaatcatatctaactttttagaaaattcaaaatttaagggggaccatgatgtgaaacaaataaacaagcttttggtagccaatcgtggtgaaatagcaataagaatttttagggcagcgacagaattagatattaaaacagttgcaatttattcaaatgaagataaaggatctttacatagatataaagcagatgaatcttatttagtaggcaaagatttaggacctgctgaatcttatttagatatagaaagaatcattgatgttgctaagcgtgcagatgtagatgcgatacatcctggttatggctttttaagtgaaaatgaaacatttgctcgtagatgtcaagaagaaggaattaaatttattggtccacgtgttgaacatttagacatgtttggcgataaagttaaggcaagaacaacagcgattaatgcggatttaagagtcattccaggtacggatggtcctattgataatcaagaggatgcgattgcatttgctaatgaagcaggttacccattgatgattaaagcgacaagtggtggcggcggtaaaggtatgcgtatcgtacaatcggaagatgaattagaagacgcattccatcgagctaaatctgaagcggaaaaatcatttggtaatagtgaagtatatattgaaaaatatatagacaatccgaaacatattgaagtacaagttatcggtgatgaacatggtaatatcgtacatttatatgaacgtgattgttctgtacaaagacgacaccaaaaggtagtagaagtggcaccttcagttgcattgtcagatgatttaagggaacgtatctgtgaagcagcaatccaattaatggaaaatattgaatatgtcaatgcaggtacggtggaattccttgtatcgggcgaagaattctacttcattgaagttaatccgcgtgttcaagtggaacatacgattactgagatgattacaggtgttgatatcgttaaaacacaaatacttgttgctgatggtgaaaatctatttgacgaagaaataagtatgccaagtcaagcagatattaaaacattaggatatgcgattcaatgtcgtattactactgaagatccaacaaatgattttatgccagatactggacgtatcatagcttatcgttcaagcggtggttttggagtgagattagatgctggtgatggattccaaggtgcagaaatttcaccttattatgattcgttattggtaaaattatctacacacgctatgtcttacaaacaagcaaatgaaaaaatggatcgttcattacaagaaatgcgaatccgtggtgtgaaaaccaatgttccgtttttaattaatgttatgagaaatgagcaatttaaaacaggtgattatactactaaattcattgagcagacacctgagttatttgatattgaaccgatattagatagaggtacaaaaacgttagaatatattggtaatgtttcgattaatggatttccaaatgtagaaaaacgacctaaaccgatctatgaaacatcgccaattccacaaatccctagaaaagaaatagcaaaattagagggaacgaaacaaatactggatactaaaggacctaaggcagtagcagaatggttaaaagagcaagacgatgtattaatcaccgacactacatttagagatgcgcatcagtcattattagctacacgtgtgagaacaaaagacatgatgaatattgcttctaaaacagctcaagtaatgaaagacagcttttcattagagatgtggggcggtgcaacttttgatgttgcgtataatttcttgaaagaaaatccatggaaacgcttagaaagattaagaaaagaaattccaaatgttttattccaaatgttattacgcgcctcaaatgctgttggatataaaaattatccagacaatgttataaaaaaattcgttaaagaaagttcagaagctggcatagacgtgttccgtatctttgactctttaaattgggttgatcaaatgaaagtggccaatgaagctgtacaagaagcgggtaaaatttcggaagggacgatttgttatacaggagacatattaaatccaaatcgttcggatatttatactttacaatactatgttgatatggcgaaaacacttgaacgtgaaggattccatatattagcgattaaagatatggcgggattattgaaacctaaagctgccaatgaactaattggagaattgaaagctgcggttgatttaccaattcacttacacacacatgacacaagtggaaatggtttattagtgtataaacaagctatagatgcaggtgtagacgtcattgatactgcagtagcttctatgagtggtttaacaagccaaccaagtggcaactctttatattatgcattaaatggatttgatagaaatatgcgtgcagatgtagatggtatggaagagttatcacactattggggtacagtacgtcaatattacagtgattttgaaagtgatattaaatcacctaatactgaaatttataaacacgaaatgcctggtggtcaatattcgaacctaagccaacaagctaaaagtttaggattaggcaatcgatttaatgaagtaaaagaaatgtatagacgtgtgaacttcttatttggtgatattgttaaagtaacgccgtcatctaaagttgtaggtgacatggcattgtacatggtacaaaatgatttaaatgaagatactattataaaagatggctataaattggatttccctgaatcagttgtgtcattctttaaaggtgatattggacagccggtcaatggtttcaataaaacgttacaaaaagttattctcaaagggcaatctgccaatacagatcgaccaggggaacatttagatcctgttgattttgaagcagtaagaaaagaattagaagaaaaacaagagagagaagtaacagaacaagacatcataagttatgtgctatatcctaaagtttacgaacaatttatagcaacacaaaaacaatttggaaatgtgtctcttttagatacgccaacattcttctttggtatgcgttcaaatgaaacggttgagattgaaattgatacaggtaaacgtttaatcattacacttaagacaattacggaaccagatgaaaaaggtatacgtacaatcttttatgatatgaatggccaagcgcgacgtatctttattcaagatgaaaatgttaaggcgaatgaaagtgttaagccaaaagcagataaattaaacccaaatcatattggtgcacaaatgccaggttcagttacggaagtgaagattgctgaaggagaatctgtaacgagtggtcaagcgttattgattactgaagctatgaagatggaaacaacgattcaagcaccgtttgatggcgttgttaaaaaagtaacagtacaaagtggtgaagcgattgaaacaggcgacttattgattgaaattgaaaaagaacctgttgattagtttaaaaataaaaagcaagctcagttttcttaaaaactgagcttgcttttttatgtgattatatacccaaaacgttaattatccgccacttcgaattgtacgtaacattaatatgataaagtatgcgattaatccgaagagtaatgtaataaacaatgcatgtaacaatgcgatgaataaattaacttcagtaataatggataatgcgcctgtagttacttgtaagataactaaaataaatgccgctgtataaccgtaacgaattgtacgattttctctataattgtttacggcgtggataaatgtaattaaaatccaaataaaggcaatgagtgccatacctctatgtgttaaatttacccaatcctgaacattatgtggcattaaatcattaaacggtaatggccattgaccatacgctaaacttgcttctttatgtcttactaaagcacctgtatatatcgtcatataaacaatgagtgccataatccatgtataaattctcaatggttttctaataaacaattcatcagcttcatatttacggtcaacttcatatataattaaagttaatacaaatacagatgaaaaggaaattaaagagataccaaagtgaagtgctaatacatatgcattttgttgccacattactgctgccgcaccaactaaagcctgaattagtaagaaaccaacactaatacaagataatggtttaacttctttgatataaccaatatgtttccaagcaacaataaccaaccataaaacgacaattaatgataagccagatactgcacgatgacttaattcaattaatgtttggattggtaaattttgaggtaagaacgcgccatgacaaagtggccagtcagatccacaaccatctgctgaacctgtttttgttactaacgcgccaccaagttgaacaaaagccattatgactgttgctaacacagataaccatttaaggttttttttgctaaacaagaattaaccccccactttaaaaatataataatgaaaatatttaattacgcccagtagtgctaaaagcaacttaggtatacataatgatacatctcatttatatatttttatatgttcataaatcttaaattttattataacaataaatagcaaataaaatgtgtcacaaaaatgactttttgctaatgtcgataaagtgtcacaaatatctttacattaatgtagtcaattgaacaaaattaatatatcattgtattatatgaaaaaaataggagggaaattatgaacaaagaacaaactttggcgcataattctagccgtgtaacttttaaagagttacagcaaatcatcaaaatgggcttggttcaagggaatttaattcctgcatttgctggatcatggttagcgattgtgttggcaaatcattccttcctctcgtcaataccacaaatcttaatgatgttagtgggctctacgttaattatggggggcgcatgtgctttaaataattactacgatcaagatattgacagtatcatgccaagtaaacaacagagacctacagttaatgaaagaatttcaaatagaaatttattaattctcagctttggaatgatgctcataggggaagcattactatttgcactcaatataccttcaggcgttattggtctattgggcattgttggttatgtatcattttattcaatttggtctaaaagacatacggtttggaatacagtcataggtagttttccaggagcagttccaccgctaattggttggacagcgatagaaggaaatataagcttagtagccgttgcactattcttagttatcttctgttggcaaccgattcatttttatgctttagcaattaaacgtaaggatgaatattcattagcaaatataccaatgttaccatcagttaaaggatttaatcgtacgagagtaagtatgtttttctggttagttgtcttgttaccactaccattcttattaagtagcttaggtgttacatttattgtgttagctactttattaaatttaggatggctttacttaggattaacaagcttcaaaaaagatacagatcaaacaaaatgggcaacaaaaatgtttatatattcactaaactatttagtcgttttcttcgtactcgttgttgtcatctcgctcattcaaatgttttaataacttatgataaggatgtattatatgaacttaccaattttacccacaatcagtacaagctttattgtaattagtgcaatccttattgcaataggttggcgtcaaatatggaaaagaaaaattgaaagtcataaaaaggtaatgttggctgcagcattttttgcactagcattctttatcatttatgcttcaagaacaatttttataggtaatactgcatttggtggtccagattctatcaaaatttattatacaattttcttgattttccacattaatttggcaacaatcgggggcattttaggacttgtacaaatcattaccgcctttaaagataaatttaaggtacatagatttgttggacctatagcatcgattgtctggttctgtacagctattacaggtgtagctgtatacctattgctttacgtattatatccaggtggcgagacaacatcgctacttaaagcaacgtttggattataataatcaataaataaagcgttagttttttaaaaggcatataagaggagtcatctcaatgagatgactcctctttgttttgaatagctaacaagacaattagcgttctgtatatctttttaagtgcttggctgtaagcgacgcatttatttgaagtaaaccttgaggttccccttgataaagtaattggccccctttttcacctgcaaatgggccgatatcaataatccaatcagcataagtcatcatcgttaaattatgttctataataacaactgtattgtgttcatcgatgagtcgtttaaagcaatctattaatatggggatatcatcttcatgtaaaccagtcgttggttcatcaaaaacaaagatatgttggtggacagtctttgttaagtatttacttaatttgactctttgtacttcgccaccagacaatgtatcaagtgtttgtcccaatgtcatatagtttaaaccagttgattttaaagcttggagtggttgagcgatatccttatttttattgaaaaaggtgattgcttcatcaaccgttaatgctaaaatatcagcaatattatacccctccactttaacatctaacacttctggtttgtatcgtttaccatgacaaacatcacatgtttgtgtgaaatctggcataaaggctagctctgttttgataatgcctttaccgtggcattcagggcaagcacctgcagaattatagctaaacaacgatttctttaaaccggttacttcactaaaatatgagcgcacatcatcaaatatatttaaataagtcaataaattggagcgactcgaagcatgcgctggtttttggtctataaaaatggtgtctgctagcgcttctaaacctgtatggattaacgaacttttaccagaacctgcaacaccagttacgacagtcatagcttgttcaggcagtgtcacagtcatattcttaatattgttacgagaaacattctttaaatttatgaaatttgaagcgcttaaattcggtgattttaattggtgcattctgcgcaaagcatcacctgtatgtgttgttgaattgagtaactcatgataactacctgtaaaagtaatgtcaccaccatatttgccagctaaaggacctaaatcaataatataatcggctatttttataacatctgggtcatgttcgactactaaaactgtattccctttatttttcaaggacagaataatttcattaatacgctgaatatcttctggatgaagtccaatactcggctcatcaataatatatactaaatcactcaacgcactgtttaaatgtctaatgagtttaattctttgtgattctccacctgataaagaggtggattctctagataaagttaaataatttaagccgatataactcaatgattctaactgctgttgcaatggttcaataatgacatttgcttttggtgaatcaatttttttgatgaattttaaatcatcatcaattgataaatttgtaaaatcagcaatatctaagttattgattttacactttaaaactgaagtgctcagtctttttccgtgacaagtagggcattttttagaagtaaccactctatcaatcgcttctttaaatttattttttcaaagttgtcattcaataaaaatgaacgtctaaatctatggatgagaccttcaaattttgcagtcttaggccagttttctggtgggtgtttaattttcattggcttagcgtacaagaaggtatctagttcttctttggtaaaatgttttaattttttatcgttgtcaaacaaaccagaatataaatagcgttttcctcgccaactatctggtctgaaagaagggaaacgtatcgcatcttcattgagcgatttattaaaatctaataattcatgtaaatcaatgtcctcaacgtaaccaagccctgaacaagtttcacacatacctttaggattattaaatgaaaagatatctgagtaaccaacaaacggtttgccaattcgtgaccaaagtaatctcacagatgcatagatgtccgagattgtaccgactgtagagcgagaatttccacctaatcttttttgatttataatcattgccactggtaaatgttcgattaagtcgacctttgattttgaaaattgagctagttgatgttgtatgtatgttgagtaagtttcgtttaaaagccgttctgattctgcggcaattgtattaaacactaaagaagattttcctgaacccgaacgcccagtaaaaacagttatttgatgtttaggtatatcaacagaaatattttttaaattattttgctttgcgccatgtatgcgtatcattgacatgcattttcacctcttatttcatagtatacccaaagttgagttgtgtattaccttaatttgtaatagagcgtaatatgttgaaaatctgtcgtattttacaatatacttctaatattacgacggcatgccttgtttgtgatatattgaaacatgtacaataaatgaaagagaagtataggtgggtgagcgatgaaaaaattaataattaaaattattggtgtactgttattaatatgtttcttgatttaccttttttactcaccacgtttaaagtttgatgttttggagaatcctaataaagattcaacgaagactactcaaaatgaaaatattaataaaaatgaggaatcagttgaaaatccgatgccaaaagaaggtatcggtacgtgggtaggtcaaaacctaaaaaaacttacaaatacatatgggcaagctgaacgggtttattcatataaaggtgattttaaaaattatatatttaaagagcataatcaatattatcttgttacaacaaagcataatattattaaatctgtgtacgcaactggtaaagatgcaaaagtcgatccattaaagatttccgataatgcatcacatgtttttgagaaatacagtattaatcctgaaccaacgattaaagttgatggtaaagaatatgaacttgaattatctgatttagatatgaagacgcaaacacttataaagtttaaaaatatttatgcacaaatttatattgaccaacaatcaaatgaaattgtagctgttagatatttagatagcgaagccttagcagcctttaaaccatatcaaatgttaagttctcaagaagataaagaagttcaaagtgagcatggtgatttgccctatgagcaaaattcaaatcaattgatgacattatatgaaattacaaatgaaatgagaaagttaaaggatgccaagccacttaaaattaacaatgatatagctcatattgcatcatttaacttgtatgaagctacagggactgatagtgttgaatttacagaagatgctttaaaacaacagttgaatgaacaaaaaatatcatttgtctccacgagtcaaaacgtaggatatgattttaatgaagtacctacgttgattcatagttggttaaattcggatatccatagatcaaggatgttaaattcaaaatataatgaaatgggtggcgaagtaacaaatggttattacacacttattttcgtagaggataaatagaaaggagatggacgacgatgattacagaagaaactttaacagtgctagatgaaatagaaatgctcagtgataaaatattacaatctcgattatataaagcatacaaaacagctgaacagacattagccaatgatgatgaagcgcatctactttatcaagctttcttaaaatctaaagaaaaatatgatgaaattatgcggtttggtaaatatcatccagattatcaaagtgtcatgttagaaacacgtaaacgtaaacgtgcatatgaaatgcttgatgtagtgatggattataaacaaaaagaagttgctttgcaggaattgatagatcaagttattgtgaaaattgcttacgcagtttctgagaatgtgaagattgaagcgggcaatccatttttccaaaaagaatcaggtggttgtgccactggcggttcatgtggttgttcattataaaagatagattggaatttttaagaaaatagtaaaggaggcagagcgctaacaggactctgcctccttttttgtgaatttaatcagatattgaaatcattgtaaatagcacttgtcgtttattttataatattatttgggatacgtatttttaaatctttctgctaaatcaggtcgatcagtgactaaggtatgtgcaccataaaagattaaatcattcatcatatctaaattgttaacaccatagtagcctggaacgatatttcgttcgtttaaccattgtataaacttgggcgatgttagcttaatcccgttaaaagaaacaggcatttgaaacgtattcgcacgaggttggaaagtattgccaagacctgtgaagaatttcaatacgccttcagctacttcattttgacttgcaccaatcgccacagtaccatggctaattatattaaatctttcaatttgttgactgtgaaaacttgtcactaaaacgcgtttttgtgcatggtgtgcaacgatgacttcataaatgatttctggcgctaattcaccttctttgcttttggggtcatcttttaaatccacattaattaattgatttggataatgttctaataattcatcaaatgataatattttggcatcttcatgtccacgataaactttagtcccattaatatcggtgaatcgataacctgcatctagttgttttaattctgctaaggtgtgttcagatactttacctgatccatttgtagtacgatcaacagtagcatcatgaaatactacaagtttatggtctttcgtaagtctgacatctgttttaaaaccatctatatcatgtgcgactgcattatcaaaagcaagcttagtttgctctggtctgacagccataccacctcgatgtgcaaaaatatatggtgcagttctagaaaagaaaggtggtatactttgattatgcggttgtgttttatatttattaataaaaattaaacttcctaccaaaccgactgtgcctaaaaatccagctttaattatgttattaatttttgtcacgagccttcctcctcaaatttgggtatatagagtaatatagcaaaagttcatgctacatcaaaataattattatttataaaatggaaaagccatgatattatataatagctaataaatggagtgatgaataaatgaatattgtaccaagaacaagtataattatatatctaaaacatatgaagcatgaaagacaagtacgtaaattcgggcatattgtcagtactaatagactagagagatttgttgtcatgtacattaatgaagacgaagcggatcaagttgttgataaattaatgagattaaaatacgtgaagcatgttgaaggttcaccttataaatatttgaagaaagtttatgagaaagaacagcatgaagttttataatatgaacttaacgatactgctgcacactgactgaagcagttgctatatcagcgttaacaatagaaaagccacaatagtatatgcaatagctatagtggctttttgttatattattgcaaaggtggaatccatctttgtaagcgcaagacacttgttaaataattaaaatataattcagtgtcgtgaaatcgttcggcgggctggacgtcaacagcttttatattgacgtgatatttttcagcctggttatttatcagttcaaattttttattggaatcagggtaagggtatttcactgcgttaagcataatatacattgcttggaaatgttgttcactggttggttgcatgatgatagcgacagatgaacgtgcgtgtgcacaatttggagaatgaaaataaacgatatgtgctatacgttggtggttatattctattaatgtattaaattcgaataaatctgtaaggccttctccgagctttataaatgattgtttcaaaatacgatgcctccttatctgcagtatgcattatataaaatatattttgagaatggaagtgtaaatcatatgagagtaatttctggaatacataagagtaaggcgcttgagagtttagaaggacgcaatactagaccgacaatggataaagtaaaagaaggtatatttaatagtttacacgaagtttctggcattggtcttgatttatttgctggtagtggagcacttggaattgaagcattatctcgaggcattgaccaaatgatatttgttgatcaaaattttaaagctgtaaaagtcattaaagcaaatttaaaaaaccttaatattgatacacaagcagaagtatataaaaacaatgctgatcgtgctttaaaggccttagccaaacgagaaatacaatttgatgtaatatttttagatcctccttatgaaaaagggttaattgatgaagcattggaaggtattgcaaagtttaatttattaaaagaaaatggtattatcgtttgtgagtttaaacatcatgaaaaaatcaagatggagccattccatgagataaaacgttatcattatggtttgacagacactttgttattagaaaaaggagattaatatgtctacaactaaagcagtcattccaggaagtttcgatccgattacatatggtcatatcgatatcatagatagaagtgcggatcgctttgatgaactacatatttgtgtattgaaaaatagtggtaagtcaggcacattttcaatagaagaacgtatcgcgctgattgaagaatcagtgaaacatttgaataacgtaacagttcatcatttcaatggtttattagtcgatttttgtgacgaaattggagcagaaacgattataagaggattaagagctgtgagtgattttgaatatgaattaagacttacatcaatgaataaaaaattaaacagcaatgtagagacaatgtatatgatgacgagtacaaattattcattcatcagttctagcgttgtgaaagaagttgcagcatataaagcaaacgtttcagactttgtacctgtacatgttgaaaaagcgttaaacgaaaagtttaaaaaatgataaagaaccacttaccaacttgttggttagtggttcttatgcaattgcaaggcaattgtaaaccaaagtagcttaccaacttgttggttagtggttcttatgcaattgcaaggcaattgtaaaccaaagtagcttaccaacttgttggttagtgttacacagtagctgactgaagctaaatgcacacaagcatgttttttagcattctagtcagccttgtgggggcgggacaacgaaagcattattaaaaagctgatttctgtcccggtcccttatgcaattgcaaagctaaatgaccatgcttggtattttaatccgtatcaaatccgtatcaccggtgtattaaagtcgtttgcagtttgacctgaaataaggttgtaaattttagtagcatgtatctcattagtaaataaatttgcgttttgtttattgacttgcgtcacaaagtttctttctggaaacgattttttaatttgttttaaatactgttgtccacgttcagacatgcctaggatacgcacagcgttaattgaggcaggctcatcatgttttttaaaatttaaaagtatattcataagtaaacgctgaatgtgcgtataggtataacgtttcgtttttaatagcgtcattaaatgttcaaaacttgtcgcttgttcaatagtttgaagtatgcgattttcaatgccttcactcatggtataaatctgtgctaatgatgtggcattttggcttaaaattgcatattttaaataattgaatgtatcctcaatagagatatgaggtcgttcatagtgcttatgtatctcacatggtacgacatctttccaaagatccgtttgattcattaatgattgacgaatagaagtgccgcttgcaaatgtttggtgagagatttcattatcgtgatgggcagactgaaatcgggaaatcgtccatggttgtattgatggtgcgtatgtttggattgctctcacataagaaaggcctaatgtattgttgggcgatgatagcaagtcattatcagtaatcagttcgcttaagattcttgggtagcttttgccttcttttaatttttctaaaaatagaggtgattgctcaattttatcaatagactgtgccaatgatagaaaatcatccatattacccgattcgcttccaaatgataaatgagaaacatttaaataatctgctatctgcacagctgtttttgcgaaatattgacctgcagacactgatgcataagctggaagctctacgacaaggtcgacggcacgcaatgccatttttgcacgagtgaatttattgtaaattgcgggttggcctctcatcacaaagtttccactcatgattgctatggaaatgtcagagttggttattgactttgattgttgggcatggtataagtgaccattgtggaagggattatattcagtgactagtgcaacgcttttcatttgcaattcttcctttcagaattcattatagatattgtaacagatgtaactgtgttaagaaaaaatcttgacaacttatatctataaagttaaaataaattttgtgcttgttagaggtgaagccatatgaaatggtcaataacacaattaagaaaattccaagataaaccttttgaattccatcaaacggttaattttgatcatttagtaaaatcattagatttaatagatctatcagatattgatgttgaaggtgaattaaccgtcagatcaagtgaagtcattgcagatatgcatttgactgggacgtatacgatgtcttgtgcacgtactttagttcctgttgaagttcctattgatatcaagtctcaagagatttttgatttagaaggatatgagcagtttgaaaatgatgaagatgaagatgaacattaccatgatgcaacagacggtatgataaatctaaaagatattgctgaagaactagttattattgaaaaaaccatgcgcgttttttcaaaaagaagcgatcagatgttacgagaaggtaat

SEQ ID NO: 52 - DNA, 17395 bp, Staphylococcus saprophyticus
tatgtcgtcatgtccatcatggagttggtagatatttaggtgttgaaacacttgaagtaggtggcgtgcataaagattatattaaattacaatataaaggcaccgaccagttatttgttcccgttgatcagatggatcaagtgcaaaaatatgttgcgtcagaagacaaatctcctaagttgaataagcttggcggaacagaatggaaaaaaacaaaagccaaagtacaacaaagtgttgaagatatggctgatgaattgatagagctatataaagcacgtgaaatgtctgtgggatataaatttggacctgatacagcagaacaaaatgattttgaaattgattttccatacgaacttacacccgaccaaagtaaatcaatagaagaaatcaaacaggatatggaaattgagcgtcctatggatagattactatgtggtgatgtaggttacggtaagacagaggttgctgtacgtgcagcatttaaagcagttatggaaggtaaacaagtagcatttcttgtgccgacgacgatacttgcacaacaacactatgaaacgttgatagagcgtatgcaagactttccgatagaagtacaactcataagtagatttagaactacaaaagaagttaaagaaacgaaagaaggactaaagtcaggattcgttgatatcgttgtaggaacacataaattgttaggtaaagatattcagtataaagatttaggcttgcttatagtagatgaggaacaacgttttggtgtacgtcacaaagagcgtattaaatcactgaagaacaatgtagatgtactcacattaacagcgacacctattccacgtacattgcatatgagtatgctaggtgtgagagatttatccgttatagaaacaccaccagagaaccgcttcccagtacaaacttatgttttagagcaaaatacgaattttataaaagaggcattggaacgggaactatcaagagatggccaagtattttacctatacaataaagtgcaatctatttacgagaaaagagaacagctgcaaatgcttatgcctgacgcgaatatcggtgtagcacatggtcaaatgaatgaacgtgatttagaggaaacgatgctcagctttattaaccatgaatatgacatcattgttactacaacaattatagaaacgggcgtcgatgtaccaaatgctaacacgctgattattgaagacgctgatcgtttcggactcagccaattgtatcaattaagaggacgtgtaggacgttcaagtcgtataggttatgcttatttcttacatcctaccaataaagtgttgtctgaaactgctgaggaccgcttacaagcgataaaagaattcactgaactaggttcaggttttaaaattgccatgcgagatttaaatattcgtggtgcaggtaatttattaggtaaacaacaacacggtttcattgactctgttggtttcgatttatattctcaaatgttggaagaagcagttaatgaaaaacgtggcgtaaaagcagaaaaacaagatgcacctgagattgaaatagaacttaatatcgatgcttatttaccagctgaatatataccaaatgaacaatctaaaattgaaatctataaaaaattgcgtaaaattgaaagtgaaacacaattaatggatgttaaagatgaattgatcgatcgcttcaatgactatccaatagaagtagaaagattattagaaatgatggaaattaaagttcatgcgttacacgcaggtgtgacgttaatcaaagatgttggtaagcaagtagaagtctacctgtcagaaaaaggtacaacagatatcaatggtgaaacattatttaaacagacacagccacttggtcgtacgatgaaagtcggagttcaagaaggcaaaatgaaagtaacgttaaataaaacaggtaactggttagacagtctaaaattcctaacgaaaagtttagaagaaagtatggttataactgatgaaatctaaaacggataagtcatctgcttttaacggagtagttgtgcttacattagcactcatcatagttaaaatattaagtgcaatctatcgagtaccttatcaaaatatcttaggtgacgaaggactgtatgcgtatcaacaagtttatccaattgttgctttaggtgttattttgacaatgaatgccataccgagtgctgttactcaaatgtttggagcagacggtcatcctcgccaatatatgaagattttagtcggattgcagattgtcagtactagtttttttttagttttgttaatctgtgcaaaatggattgctgccttaatgggtgatgctaacctcgcaccaatgttaagcgcatcgagttttagtttcttatttgttagtatattgggtatttatagaggctactatcaagcgcatcaaaatatgaatatacctgcaatttcccaggttatagaacagtttgttcgtgttggcattatcattatcgccattgttctatttatgacacaacaatggtcactgtatgcggctgggacattggcgattattggttcagcttttggatttttagcatctagtatatatcttgtgttgaaacgacctttcaaattaaccgcatttaaagcgcaaaatattgaacataataaggttgttgcatggcgacaattggcattagccattgtgatttttgctgtaagtcaacttattgtgattgtatggcaagttgtggatagctttaccgttatccatgctttgcggaatacaggattgagttttcaagaatctacaacgcaaaaaggcatttatgatcgtggtgcatcttttattcaaatggggttaatcgtcactaccacattttgttttgtccttattccattgctgacagatgcgattaaagttaagaatcatgtacttatcaatagatatgcgaatgcttctattaaaattactatgctatttagcattgctgcgggtatcggtttgattaatttactacctatcatgaaccatgtattttttaaaaatgatagccaaacgggaactttagcagtgtatatgctaaccgttatatttgtatctttaattatgatggatattgcattgttacaagtgaagaatcaagtgcgacctatatttcaagcgtttattactggtgtagtgagtaaagcgattttaaatgtagtattgataccgccatttttcatgttaggtggtagtttaagcacagtgttatcattaatcttatttgctgccattttgcattatcacgtattgaaacattatcaattccgtaatatgaaaaaatatgtcgcaaagttaatttttacaatgctgatattatccgttgccgttcaactaacaatgtggttacttcctacacagggacgcgtcgcaggtattgttgaattggtcgttgctgcaggtgtaggcgttatcgtcatcatcattgcaattgttcgtactgagctattaagttttaaagagttaaagcatttaccattgggtgataaactcatccatatgaaaagagggaaacgataatgactggaaaaattataattgttggattgggtaattatggcattgatgaattaccctttggagtatataaatttttgaagcagcaccccttcgtttatacgcgtacgttagatcatccagttatagaaatattgacttctgagggtatcgtatttcaaagttttgatgaagtttatgaatcaaatagtgggtttaatgaggtttatgaagacattgtatctcaacttatgactaaagcacgaaattcagacacagatatcgtctatacagttccggggcaccctcgcgttgctgagacaaccactgttaagttagaggctcatgcgcaacaagatgatattgaaattaaagtcttagggggcaaaagtttcattgatgatatctttgaagcggttaaagttgaccctaatgatggctttacattacttgatgctacttctttaagcagcgaacagttgaatattcgaacgcacacactgattactcaagtgtttagttccatgactgctggagatttaaaagtcacattgatgtcgcgttacgatgatgaacaaattgtattcattattgatggtgcgcatgctagcggtgccaatgtcattgaaacacccttatacgaattagatcactatccagacattttcagcaacttaaccagtgtatttattaagcgtgttgaaaatgatgccacatatatgagtgattttgactatgcgacaggaattatcgacagacttgtagatgatgaaattggatgtccttgggataaaattcaaacacaccaaacgttaaaacgttatttactggaagaaacgtttgaattgtttgaagcgatagataatgaagatgattggcatatgattgaagaacttggtgacatattattacaagtgttattacatgcaagtattggtaaaaaagaaggctattttgatataaatgaagtagtacaaagtttatccgaaaaaatgatacgcagacatccacacatttttggagaggcgcatgcagaaactgaagaagatttaaaacacatttgggcagacgccaaagcaaaagaaggaaaagtccaacgcgtgaaattcgaaaaagtgtttgcagagcatttcatgaagttgtatgataaaacaaaaaatatgtcgctagatgaagctgctttaaaagattatttagagcaaggaggagataaatcatgagactggataaatatttaaaagtatcaagactggtaaaacgtcgtacattagcgaaagaaattagtgaccaaggtcgtatcactgtaaatggttcggttgctaaagctggaacagatgttaaagtaacggacgaacttgtcattcgttttggacaaaaaattgtaacaataaatgttacagggttaagtgaacatgcaactaaagaaaacgcaaaaggcatgtatgagattgttaaagaagaaaaagttggcggagaataatagaggaggtggcaagcattgagtaaaaaagttgaaaatatcggaaatacgttcacctcttctgaaaataaaaagaaacaaaagcaaaaaatgagaagacgtgtgatacgcagacgtatcactttgtttggtgggatactgctcgcgattattattattttgtgtatcatgcttgtcactcaaaagcaaagtaataatgacgatgctgtagaacgacaacaaaaagaagaaaaatatcaaaagcaacaagatgaggaattagcattaaaagaacaacttaacaacttaaatgataagagctatatagaaaaagtagcgagagatgattactatttaagtaatgatggagaagttatatttaagttaccgagtgataaatcggatgcaggttcaaaatcttctaaagaagataaatagcgaaaattatttttttgcatcataataccattgttaatttatgcaaacaggcatataataaggttaaaatcgaaacaaatcgggaggatttatttacaatatgtcaatcgaagtaggaaacaagcttaaaggtaaagtcactggtattaaaaagtttggcgctttcgtcgaacttccagaaggaaaaagtggcttagttcacataagtgaagttgcagataattacgttgaaaacgtagaagatcatttatctgttggagatgaagttgaagttaaagtgctatctattgctgatgacggtaaaattagtctatctattaaaaaagcaaaagatcgtccgcgtagacctcaaagtaaacctagtcataaacaaccacaacccaaaggtgaagactttgaaaagaaattaacaaacttcttaaaagatagcgaagataaattaacttccatcaaacgtcaaactgaatcaagacgcggcggcaaaggcgctagacgctaataataaataatacaactgtttcatatataactaactgatttattgagaacaacgtacaatcaatgattccaatattaagtttgagcgtaacaatctaagactgttttcttaattgaggaaacagtctctttttattgtaatatgggatgattccaaagtgattaggctaattgttggaagatttagagtgagtggaggtagatgaagctgaacgttaatactgagggttggacgaaagataagcacattgtattggcggtttctacaggtgttgatagcatggtgttattacatgagttaatcacaagattgaaagattcatacgcaaaattaacctgcttacatgtaaatcacaacatccggccgatagcgaaggaagaagaatattttctcaaacaattttgtaaagcgcatcatgttgagctttacgttaggcatttagatttatcagatgttattgaaaaagggaatagtattgaaaatgacgcaagagtagcacgttaccaatggtttgatgagatgatgtatgaattaaaggcagatatcttactgaccgcccatcatcaagatgatcagatagaaactattttttatcgagtaatgactggacgttccacaagaagtagtttaggtatggcttatcaaactacacgcgcatcttatcagatatgtaaaccattattatcgacaacaaaaaatgaaattcgtgattatcaagttatgcatcgtgtaccttattatgaagatgaaacaaatacacaaaatcattatgtgagaaatgacattcgtaatcgtattttgcctgaaataaatgaaaatgcacaacttgctacagatcaattaatcaaactaaaagagtggcatgatgaacaacttgaagtgataaataacgaagccgtcgcatttataaaacaggatatacttaaaagtgttaaaacacagaagtatacgatagcaagatcacaatttttaaatttaaggcatagtgtcaagatggcagtgttagataacctgtttgaacaacttcaaatcactcgctcaataactgaaaaaacttataatgagtggtttcaaaaattagaaggaaatttgacgcaatgcacattatacacgacagataaatggataattcatatcgcttatgataaatttataataatggcaaattatgatgtgaaacattttccgattcagattactcaccctggtatatacaactatagtcattatcaaattgacgttaaacatgactttcctgctggagactttccgttagttattcgtacacgaagagatggagataaattcgagttgaatggtatggaaggacataaaaaaataagtaggttgcttattgatcataaaatcgttcaatccgaacgcaatcaattaccagtcatggttaatgcccaaaatgagattattgctgttggcacattatatttaaaaaataaatacgaacaatcaatttttatacgatatatgggagaggaatgaaaacatgcgagatgatttaaaagaaatattattatcagaggaagatattcatcagatttgtaaagatttaggtgaagagattacacgagcttataatgggaaaccacttgtatgtatcggcatattaaaaggttcggtcatgtttatggcagacttaataaaatatattgatacgcatttagctattgatttcatggatgtttcaagttatcacggtggcacagaatctactggagaagttcaaattttaaaagatttgagttcgtcaattgaaaataaagatgtgttaattattgaagatattttagaaactggaacaacattaaaatcaatcactgagttattggagtcacgtcgtgttaattcacttgaaattgtaacattacttgataaaccaaatcgtcgtaaagctgatattgaagctaagtacgttggtaaaaagattccggatgaatttgtggttggatacggtttagattatgctgaacactatcgtaacttaccgtatatagggacacttaaaccagaaatttattcaaagtaagcaatacaattttatgaaactgaaaattattatataatgtaagtctaagcgtaaatatattaatcagtatgtctatgtgttcgctttaaaaagtatttttcatacataaaacgaacgtgacttaaattgtaaaatattgaattttgtaacttatgtgcactagggacaatttaaatttaaaatagagcattgaaaattgtaaacatagtacaaaagttgaaatactagccgtaaactcatgtattgtgttacaatttttgttagttttattattgaagtaggaggaaacgacgcatgcagaaagcctttcgtaatgtgcttgttatcgcaattattggcgttataatatttggtttattttcatttttaaatggaaatggtaatatgccaaaacaacttacatataaccaatttgtgaaacagctagataaaggtgatttaaaatcacttgagatacagcctgaacaaaatgtatatatggtaagcggtaaaaccaaagatgataaagaatattcttcaacaattttatataacaacgataaagaattagaaaaaataactgataaagcacaaaaccaagacggattgaaatttacagttaaagaagaagaaaaacaaagtgtatttgtaagtattctaactacactaattcctgtattaattattgcattattatttattttcttcctaagccaagctcaaggtggcggcggcggtggcggtcgtatgatgaactttggtaagtccaaagctaaaatgtacgatagccagaagaaacgtgttcgcttctctgatgtagcaggcgcggatgaagagaaacaagaattgattgaaattgtcgatttcttaaaagacaataaacaatttaaacaaatgggatcaagaattccaaaaggagttttattagtaggacctccaggtacaggtaagactttacttgcacgtgcggttgctggtgaagcaggcacaccattcttctcaattagtggttctgacttcgttgagatgtttgttggtgtcggtgcaagtcgtgtgcgtgatttatttgaaaatgctaagaaaaatgcaccatgtattattttcatcgatgaaattgatgcagtgggtcgtcagcgtggcgctggtgttggtggcggacacgatgaacgtgaacaaacgcttaaccaattactagttgaaatggacggatttggcgaaaatgaaggtatcattatgattgccgctacgaaccgccctgatattttagacccagcattattacgtccgggtcgttttgatagacaaattcaagtgggtcgtccagatgttaaaggacgtgaagcgattttacatgttcacgctaagaacaagccacttgatgaaacagtagacttaaaagcagtttctcaaagaacaccaggcttctctggtgcagatttagaaaacttacttaacgaagcatctttagttgctgttcgtgaaggtaagaaaaaaatcgatatgcgtgatatagaagaagctactgaccgtgttattgcaggtccagctaaaaaatctcgtgttatttcagaaaaagaacgtaatattgttgcccaccatgaagctggtcatacaattattggtatggtgcttgatgaagccgaagttgttcataaagtaacgattgttccacgtggacaagcgggcggttatgcaatgatgttacctaaacaagatcgcttcttaatgaccgaaccagagttgctagataaaatttgtggcttacttggtggacgtgtttcagaagatatcaactttaatgaagtttctacgggtgcttctaatgactttgaacgtgcaacgcaaattgcgcgtcaaatggttacagaatacggtatgagtaagaaacttggacctattcaattctcaagcagtagcaatggccaagtgttcttaggtaaagatatgcaaggtgatcctgaatactctggacaaattgcttatgaaattgataaagaagtacaacgcattattaaagaacaatatgagcgttgtaaagacattctgttagaacataaatcacaattactcttaattgctgaatcattactaacagaagaaacattagttgctgaacaaatacaatcattattccatgatggtgtgttgccagaagttgactatgacggagctaaagtcgtagaagaagacaaaaatgacttcgaagatggtaaatacggtaaatcatatgaagatgtgcgtaaagaacaattaaatcgtagtgacgatgatcaaaaagacgatcatgaagatgaagaatctggtgacaatgaaaaagacggtgaaaattcagagccaactggccatgaacaagcacctgacattgacagaccaggtaattcaaacgaccctggtcgtcgaaactaaagactgaattttaaacttttttctgctatgatacgaatagtagaaaaaagttttttttatggttcatataattgcaaacagatgtttcgcaatttttggtgcgaaagcttaaaataaattgcgttattaaaaagtaacccaaaatagacatgaaaatgaaatgttttataataaacacagttaatattaaaggagaaattttaaaaatgacaaatgattatatagttaaagctttagcttttggaggacagattcgtgcttacagtgccttgacaactgagagtgtgcaagaagcacaaacaagacattatacttggccgactgcttctgcagcacttgggcgcacaatgactgcgacattaatgatgggcgcaatgctaaaaggaaatcagaagttaacagttacagtagatggccaaggaccaattggcaaagttattgctgatgcagacgctaaaggaaatgtacgaggttatgtcacaaacccacaaacccattttcctttaaatgatcatggcaagttagatgttagccgtgcagtaggaacgaatggttcattaacagttgttaaagatgtaggattgaaagattatttttctggttctagtccacttgtttcaggtgaactcggcgatgatttcacatactattttgcaaaaagtgaacaagttccttcatcagtaggattgggtgtattggttaatccagataattcaattaaagcttctggaggatttttaatacaagttatgccaggcgcagaagacgaaacgattaataaactagaagatgcgattaatcatatgacacctgtttctaaactcattgatcagggtttaacacctgaagaattactttttgaaatattaggtgaagaaaatgtacaaatattagaaaatgttccagcacactttgaatgtaattgtggacatgacaaatttttaaatgcgattaaaggtttgggagaagctgaaattcaaaatatgataaatgaggatcatggtgctgaggcggaatgtcatttctgcagaaataaatatcaattttctgaagaagagttacagcaattattagataatattaaataaacccgctagaatgaaactagacagataagtatgttaggttaaagttggaagaataagtttttgcagttgtatttacagaaaaatctgataaaatagcatgtatatccgattgaaaaagtaggtcttaaaatttttaaacgaaaaggagcaatacttatgacacataaaccagtagataacattgtagaggtaattggtaacacaccagtagttaaattaaataaggtagtagacgaagacattgcagacgtatatgttaaacttgaatatcaaaatccaggtggttctgtaaaagatcgtattgcattagcgatgattgaagaagctgaaaaagcaggcaaaatcaaaccaggtgatacgattgttgaaccaacaagtggtaacactggtattggtttagcatttgtttgtgctgctaaaggttataaagccgttttcactatgcctgaaacaatgagtcaagagcgtcgtaatttattaaaagcatatggcgcagaattagtattaacgcctggttcagaagctatgaaaggcgcgattaaaaaagcaaaagaattaaaagaagaacatggttattatgaacctcaacaatttgagaaccctgctaatcctcgtgttcacgaattaacaacaggtccagaattagttcagcaatttgaaggtaaaacaattgattcgttcttagctggtgttggtactggtggtacattaagtggtgctggtaaagtattgaaagaaaactacccagacattaacttagttgcgattgaaccagaagattcacctgtattaagtggtggcgaacctggtccacataaactacaaggtttaggtgcaggatttattccagacactttagatgaaaatatctatgacgaagtagttcaagtaggtaatgaaactgcaatggacatggcgcgtaaagttgctaaagaagaaggtatcttatgtggtatttcttcaggtgctgctatttatgcggctattgaaaaagcgaaacaattaggaaaaggtaaaacagtagtgactgtattaccaagtaatggtgaacgttacctttctactcctttattcgcatttgatgactaatccaatataatgtgaaattgagccgggcacatataaatgtgcaccggctttttgttttgcagtgccttttaatatgttcaaggataatgttaaattttaggttggtatatgtatggattaagcgctgattactgaaaaatatagcaaataacgttattatagaaataagataacaacttaaagataaaatcattttataagtgaaaggaagcaaaatgattatgacacatacaaaaattatgggcatattaaacgttacaccggattcattttcagacggcggtaaatataatacagtcgatcgtgcagtgaaaagggcagaggaaatggtagaagagggtgtggatattatagatgttggtggtatatctacaagaccaggattcgaagaaattactgtagaagaggaattggaccgtgtattaccggtagtgaaggcattgagtcacttagacgttcaactatcaatcgatacatatagaagtgaagtagcagaagcagcgatgaaattaggtgcaacgatgataaatgatcaatgggctggactaaatgatgcacgtatatttgatattattgcaaaatacgagggagaaattgtgttaatgcacaatggcgatggtcaaagatcagaaccagttgttgatgaaatgttagtgtacttgcttaaacaagcaaataaagctgaaatggctggcattcctcaacataaagtttggctcgatccaggtattgggtttgcaaaaactagagaagaagaaaaagaagtcatggcacgattagacgaacttgtagctacaggttacccagtactattggcaacaagtagaaaaagatttattaaagaaatgattgagcaagagaccacacctgttgaacgagatgaagcaacagctgctactacagcctatggtataatggaaggcgtaaaagcggttagagttcataatgtcgcgctgaatgttcgtttaggacaaagcatggattatttaaaggagaatgataatgagcgacacaatatttcttaatggtatgagattttatagttatcatggtgcgctaccagctgaaaatgaaattggccaaatatttatcgttgatattacgatgaatgttgatttgagcacagcgggtcagtcagatgatgttaaggatacggtacactatggtgaagtatttgaagatgttaaagcaattatggaaggtgagccggtaaatttattggagcatctagcggaacgtattgcaaaacgtataaattcacactataatcgtgtagtggaaacgaaagtcagaatcactaaagagaatccacccataccaggtcattatgatggtgtaggtgtagaaatagtgagggagagtcgcgcatgacatacgcatatttaggtttaggaagtaatgttggggagcggttgactcagcttgaagcggccatatcgattttaaatgataaagagggcattacagttacacagaagtcaccgatttatgagacggacccagtaggttatgtagatcaaccacaatttttgaatcaatgtattgaagttcaaaccacattggagcctaacgaattattgaaagcctgtttggatactgagcaacaactacatcgagtgagagatatacgttgggggccaagaaccttagatgttgatatcttattatatggagatcaaattattaatgaatctgagttaatagtgccacatccacgtatgttggaacgttcgtttgtacttattccattgaatgacattgcaacgaatgtcattgaacctaattcaaataaggaaatagggcatttagtgataccagatgagtcagttaaaaaatatgaattttaataaatgtgcgtaaatgcgtatttttgaagcggctatgtgcacgtacattatatggattgaatttaatgagttactgtcagtcgtgtgagtacatgtggagcgatttaggcatataaaatatatgcatgcacccattgccgtgtataacttagtgctttttatgaagaactgcatatgtaactatcagtatttaatcaccggccgcgtgtcagttgcacgattatctatttgaaattaagtatttataagtgaatcaataaaatgcagaaaaaagtttaaataactttattccgtttgcatcgtctagtagaattgaagagtgagaaagttggaatgtgagaagtacatatgaatgtgtttagctatccttaaggatactcacttctaagaataaacaaagcagaaaatgttttgttaagttgaaattcggtaataaatgatcatttttatttaaatatttcaattagaagtccaagcaatagaaagtgaaagtagaacaagaagcataaaggagagaaagttatgtcagaagaaatgaatgaccaaatgcaggtccgtcgccaaaaattacaagaactatatgatttaggaatagatccatttggtcaaaaatttgatcgtacttcaatggcaaccccattacatgaagactgggatcaatttagcaaagaagaattacatgaaaaagaagaagaaagtcatgtaagtattgctggacgtttaatgacgaaacgcggaaaaggtaaagcgggctttgcacacgttcaagatttaagtggtcaaatacagatttatgtaagaaaagaccaagtaggtgaagatcaatttgctatttggaattctgcagatcttggagatatagtaggcgtggagggcgtaatgtttaaaactaacactggtgaactatcagttaaagcacagtcattcactttattaacaaaagccttacgtccactcccagataagttccatggcttacaagatatagaacaacgttatcgtcagcgttatttagacctaattactaaccaagatagtacacaaacattcattaaacgtagtaaaatattgcaagagatgcgtaactatttaaatcaacaaggatttttagaagtagaaacacctatgatgcatcaaatcgcaggtggagcagctgcacgtcctttcgttacacatcataatgcgttagacgctaccttatatatgagaattgcgattgaattacatttgaaacgtttaattgttggtggattagaaaaagtttatgaaataggtcgtgtatttagaaatgaaggtgtgtctacaagacataatccggaatttactatgattgaattatatgaagcttacgctgattatcatgatattatggatattacagaaaatatgattagacatatatctgaaaaagtattaggtactgcgaaagtaacgtatggagaagaaacaatagatttagaatctaaatggaaacgaatccatatggccgatgccgttaaagaagaaacgggtgtcgacttcttcaacattcaaagtgacgaagatgcgaaaatagctgctaaagaacacggcatagaaattacagataatatgaaatatggtcatatattaaatgagttctttgaacaaaaagttgaagaaacactcattcaaccaacatttgtatatggtcacccaattgaaatctctccattagctaagaaaaatgcggaagattcaagatttacagatcgctttgagttgtttattgttggaagagaacacggtaatgcatttactgaattaaatgatccaatcgatcaaagagcaagatttgaagcgcaattagtagaaaaagaacaaggcaacgatgaagcacatgaaatggatgaagactttatcgaggcgttagaatatggtatgcctcctacaggtggattaggaattggaattgacagattggttatgttacttacagattctgcctctattagagacgtattactgttcccttatatgagacaaaaataatagcgataaatacaatagaactggatcaatctttatacatcatgtaattgatgtgtgaagattgatctttttttatgctatttacaaggcgtgtatatcgcgaatataatataacttagaagaaaatcagtacatgaatttaattctttaaagtaataagatacatttaagtaagattctgctataaaaatataaaaataaactgaaaaaaggatggaaaagtcagtttctatatgttaagatagttcaagtcgagttaaagaaacgagatacggcttaacaaatgcaacaaaataatttaagtaaatgtttgaaaagctattgacttaaatgttaaaacgttgtaatatataaaagtcgtcaaaaacgagttattacataacaaatattcaagtaaagatcttgtaaagaaaatttaaagatagtgtaaaattgactgttgcaaataatcgttaaacaatgtatcattaattgagtaagttattttgtctggtggcaatagcaaagaggtcacacctgttcccatgccgaacacagaagttaagctctttagcgccgatggtagtcggacttacgttccgcaagagtaggacgttgccaggcttagtaatcgaattgattttatgtggaggattagctcagctgggagagcatctgccttacaagcagagggtcggcggttcgaacccgtcatcctccaccatttcaaatgaatagccggcctagctcaactggtagagcaactgacttgtaatcagtaggttgggggttcaagtcctctggccggcaccatttcatgagccattagctcagttggtagagcatctgacttttaatcagagggtcagtggttcgagcccactatggctcatccagtttcattttgcagaagtagttcagcggtagaatacgaccttgccaaggtcggggtcgcgggttcgaatcccgtcttctgctccattatttttgccggggtggagggactggcagacgcacaggacttaaaatcct

SEQ ID NO: 53 - DNA, 363361 bp, Staphylococcus saprophyticus
  misc_feature (288894)..(288894): n is a, c, g, or t
  misc_feature (352132)..(352132): n is a, c, g, or t
gcaaatcgcactagataatgaacatgttaaatctgaaatagaaggtaaagatattaaaaaagttattgcagttcctaaaaaacttgttaatatcgtcgctaaataatcacaggaggaattaattatggaatctatcacagtaactgaactaaaagagaaaattttggatgctaacccagttaacattgtggacgttagaactgatcaagaaacagcgatgggtatcattccaggtgctgaaaccattccaatgaatagtattccagataatctaaactattttaatgataatgaaacgtattatattatctgtaaagccggtggcagaagtgcgcaagtcgttcaataccttgaacaaaatggcgtgaatgcagtgaatgttgaaggtggtatggatgaatttggtgatgaaggtttagatattaaaagtatttaattataaaataagtagttaattaaaagccgagacataagcatatgtctcggctttcttaaggtaatcaacagtttatttataatggtttatttgtccatatagtaatggctttacagtgaatgatgcactgttactttatcaaatgttaatgaaactattggatttcaatgttatcttttactatatatcatcaatttggaaaaggcttgcattagtgccagctacatgacctgtgacaagggcgcttgtgatattatatccacctgtataaccgtggatatccagtacttcaccacataaaaacaaaccaggtacaaacttagacatcattgttttgggttgtatttcttttaatgaaacaccacctcctgtaacgaaggctttttcaatagaaagtgtgccgttaaccgtaaaggtaaatccttttaataattctacaagttgattaatttgtgcgttggcaatatggtgcgctgttaaatcatctgagatatgggcttgctcaattaaaaataacaaatagcgctcttcaattaagccatgcaaactatttttaacaaatttatcaggtgtttcttctaacaaacgtctaatcttttgttcgagttcatttttggtaagttcaggaaaggcatccagttgcatttgaatatcttgttttttttgattcttttgttctttatatacaaattgactacaccttagtgcagcgggtccactaattccaaagtgagtgaataacatatccatttgatgtgtgattcgtgttttaccattcttttttaaaacggatagcgcaacattttttaaactcaaacctttgagacgtttgtttttgataaatgtttcagaagaagtgatgggtacttcagttggaaataattcagtaatggaatgtcccaagtgttcggcaaatttataaccatcacctgttgaaccagtttgagggacgcttgtgccacccgtggcaataattaaactattgcttgaaaattgttgctgatcatttaatgttacggtgaaagtatgttggtccgtgtattcaattgatgatacagtggattcttcttttatttctacgttattctgttgcaaagtattgatgagtgcgtcaacaacatcttgtgctttattagagacggggaacatacgaccgtggtcttcttcctttaaaagaacgcctctagattcgaaaaaatggatgatagattcattatcaaaaacagaaaaagggctatataaaaatttcccattaccgggtatatttttgatgatttcatcataaggtaagcgatttgttacgttgcaacgtccgcctccagaaattttcaatttacgaccgagtccttttttcttttcaattaataaaatattatgattattgagacttgccgcagcagctgccattagcccgctaggaccgccaccgattataattgtttgatacattttattgcctcccataagcgtatagtgttattttatagtaatatagttttgaaaaaaagtagttatcacgttattattaagattacgagtgtaaaatttaatttgagataggacgatctgaatgagtgaaagtaaagagttagtgagagggacctttttaattacgctaagtattttaattactaaagtattaggtgtaatttacattattccattctacgccataattggtggagaagaaaatctggcgcctttcaactacgcgtataccccatataatattgccattgccatcgcaacagcaggtgtgccattggcagcatcaaaatatgtttcgaaatacaatgcgttaggcgcatataaaattagtgaaaaactatataaatctagttttattgttatgaccataacaggatttattggatttttagtattatatttattagctccaagcatagctggtattacattagccaataaaggtcatgtagatggtggctggactgttgatgatattacttggattataagaattattagtatcgtggtcatttttattccattattagcgacgtggcgtggtgtattccaaggttataaatctatggggccaactgcggtatcagaagttatagaacaaattgcacgtattttattcattttaataggaagctatttagtgcttaatgtgtttaatggtagtgtacttgtagcgaatggtgttgcgacgtttgcagcggcaatcggtgcaatcgcagcaatcatcgtcttatggtattactggagaaaaagaaagagcaacatagaacgcatggttgcaacggatcatacaggtatggatgtctcatatggcaagatgtataaagagattatttcatatagtattcctttcgttattgtaagtttgaacttcccgctgtttaatttagtcgatcagtttacacataacagtgcgttgaatttagcaggtgtaccaagcaatttgcatgattactttttctcaattctgaatatgacaactaacaaaattgtgatgattccgacatctttatcagcgggttttgctgtgagtttgattccattcattacaaagacttatgcatcaggccagttacatgaaatgcacagacaaatacgcacatctttaggtgtattaatgtacataacagtgccagccagtttaggtattatggcattggccttacctctgtatacagttttctatagttataatattgacggtagccatttattattttattatgcacccgttgcaatattaatcgcgttattaagtgtgacagcgtcaatgttacaaggtatagataaacaaaaattaacagtatttgtcattttagcagcagtagtaataaaaattattttaaacacgccgcttatagttactttccatacggcaggcgcaattttaagtacggcaatcgcgttattatttgcagtgttatgtaatttttatattcttaaaaagtatgcgaaatttaacttttctgagacttggttacactttggaaaaatatttatgtatggatttatcatgatgattggggttgaattgacattcttcatattacaaatgtttatttctccagaacataaaataggttctctaattattcttgttataagtgttgtgttaggtatgctgatttatggtagcatgacaatgaaaacaagacttgctgatcaattcttaggtgaaattccaaataaaatcagacgcaaattaggtattattaaatgagattagataaatttttatcaaatatgggtgttggcactcgaacagaagtaaaacaacgcttaaaaaagaagcaagtcacaattgatgataaggtagaaacgtcacctaagaagcaaattaatccagaactagaaatagtgaaagtcaatgaccaaaagatagactttgttaacaaagtctatctcatgcttaataaacctaaggactatatatcagctacaacagatgaacagcacaagacagtgctcgatttaatagaggactatagatacttagatttgtttccagtcggccgattagataaagatacagaaggacttttattgattaccaatgatggacaatttaatcacgaattaatgagtcctggtaaacatgtcgctaaaacttatgaagtgatttctcaaaaaaacattacaaaaaatgatataaatgcatttaaagtgggtattgaattaaatgagggattggcgaaacctgcaaaattagtccaaggtgatgaattaaacaaatcgtttgtcacaatatatgaaggacgttaccatcaagtgaagcgaatgtttcatgctatagataatgaagtcttagctttgaaacgtattcgtattggcgacttacaacttgattcaacattagcatcaggagaatatcgtcatttaactcagcaagattttaaactattaggattaaaataaagaagaggtgtaaatattatgtcaaaattatttaaagcaatcgtaggcatagggggagcagctgcagcagtagtgctttcccaaaaagaaaatagagataaattaaaagatgagtacagtaaatacaaatctaatccagaatcatacaaacaaaatgcaaaagatatcgctagtcaaatcagttcaaaagctggcgaaacatataatgaagtaaaacaggatcctaaaggttatgcttcaaaagtaaaacaagatcctaaaggtttcattaatgaacaaaaagatcgtttctctaatgtgtctgaacaagaagaagagcacgttgaagaagcaagatttacagatgaaggtgcagccgatccttcaaacaatttacgagttgtaactgaagaagagttaaaaaataatagcaataaacatgacggtaagtaatacgttgtcatgattttatatcaaacctagttcgcaattggaactaggttttttatattaatacagtttatatatatagtaaaagtaagcggtttaactgttttattataaagcataacagttaatttttttgttttatgattacatctcactgtagtttctctacgacttcatgtaaaatattaagtatataagttataagaaggaagttgattgtatatgtggagagacaaagtaaaagaatatgaggatttcatactagaagatttgaaaggtttactttcaattgaaagtgtaagagaagacgataaagcttctgctgaaaatccagtaggacctggacctagacaagctttagattacatgtataaaatcgcagaacgtgacggctttggcacacatgatgttgatcatatcgcgggacgtattgaagcgggtaaaggcgatgatgtatttggtattttatgccatgtggatgttgtacctgcaggcgatggatgggattcagatccgttcaatccagtagtaactgatgataaaattattgctcgtggtacgttagatgataaagggccgaccattgctgcttattatgcagttaaaattttaaatgaaatgaatgtaaactggaagaaacgtatacatattattattggtacagatgaagagtctgattggaaatgtactgagcgttatttccaaacagaagaaatgcctgaattagggttcgctccagatgctgaatttcctgctattcatggtgaaaaaggaataagcacgtttgatgtaattcaaaatgaaaaagcagatgatcaagatgagcctgaatatgaattgcgttcatttgtatcaggacaaagatataacatggtgcctgatgaagcgattgccaatgtagctgttaaagaaaatatgacagatgttatccaaaattttgaacaatacttaaacgagcatgacgttgaaggtgaaagtgttgtagatagcggtgtcttggtgcttaaagtacaaggtaaagcggttcatgggatggatccatctataggcgtcaatgcaggattatatttacttaacttccttgcaacattaaatttagataaaactgctgcaaatttcgtagcgtttagcgaacgatacttgtttgagtcacattttggagaaaaaatgggaatgaaattccacacagatgttatgggcgacgtgactactaatgttggaattatcacttatgataatcaagatggtggcaaattcggcattaatttaagatatccagaaggttttgaatttgaagaatcgttaacaagattcaagggagaaattcaatcactaggattttcaattgagttaggtaaaaatcaaacaccacattatgtagaaaaagacgacccattcgtacaaagcttagtacaagcctaccgtaaccaaactggtgatgatacagaaccgtatacgattggtggcggtacttatgcacgaaatttagataaaggtgttgcatttggtgcgatgtttagtgattctgaagatttaatgcatcaaaaaaatgaatatataactaaaaaacaattattcaatgcgacaagtatctatttagaatcattatataaattgtgtgtggaggaataaatatgacaaaagtattaataaatgaaaaactcgttgatgaacaagatgcaaatgtgccttataatgatagaggttatgtatttggcgacggtatttatgaatatattagagtatatgataatagtgtatttactgctaaggaacattttgaaagacttttacgtagtgcaaaagaaattggtcttgaattaaaatataacgttgaggaacttacggaattaatacaggagttattatcaacaaatggtgtgattaatggtggtgtctacattcaagttacacgtggtgccgcaccgcgtgatcatgcctttccaacaccttctgttgaaaccaatattatggctttcactaaatcatatgatcgtccttacaaatcattagaagaaggtattaatgcgatcactactgaagatattcgttggttaagatgcgatattaagagtttaaacttgttgggtaatgtattagctaaagaatatgcagttaaatataatgctcaagaagcaatacaacatcgtggtgatattgtcacagaaggttcttctagtaatgtgtatgcaatcaaagatggtgaaatctatacacatcctgtaaataattatattttaaatggtattacgcgtatggtaattaaatctgttgctgaagataaagggataccttttaatgaagaaacgtttacattagactttttgaaaagtgcggatgaaatcattgtatcaagtacttcaattgaggttatgccagttgttaaattaaacggtgaaaatgtcggtgatggtcaagttggttcgataacaaaatcattgcaagaaggatttaacagatacattgatacacatagttaatattttcaataaatagatagaaaatataacaaaaattcatattaaattatgttataatgctaactgagccgtttgaaagaaactaatagaaataagaaagtaaaaagtgactttttgtttctcattattggttgaaattcatacccaaacattataaaatcttttatgagtcttgaaattgaacgagaaaaatttcttgaaaaaagatagagaaatattaaaaaatatgctctgtttgggtttcttttatggtatgctataaaagttactataatttgaaaatcagttatttataattttaaaaattaacttgagccacatgggacattatgctagtcataacacttgagacagcataaattatggttgaagtttaaaaaatttgctatagaaaatgattatatatggctctcgaaaaatgtttttcaggagccattttctaattgaaagtgaggtgaacgtgttggagcagttttatcaattgggatggacgcttgactcagcaggcggtgcatcgggtgaggcatacatggccgaacaggatggacaaaaattattcttaaaaagaaattcaaatccatttatagctgcattatcagctgaaggtattgtgcctaaacttgtatggacgaaacgcattgaaactggcgaagttgtaacagcacaacattggaaaaatggtagagaacttactttcaatgaaatgcatgaacaacgtgtagcgaatttattgaaaaaaattcatagttcaaagacattattaaacatgctaaaacgtatggaaatggaacctatcacgccagatattttattaaataaaataaatgcttcgttatcaagagatgtactgacacatcacgtggttagaaaagctttaacgtatttggaagatcacatacctaacttagatcctcgtttctttacagttgttcatggtgatgttaaccataataattggttgttatcagatcatgatgagctatatctcgttgattgggaaggtgcaatgattgctgatcccgcaattgatttaggtatgctgctgtacaattacgttccagaaaataaatggccagagtggttaaacgtgtatggtacaaaagattcaatggatttacaaaaacgtatgaagtggtataccgttgtacaatctatcggtatggttcaatggtatgaagaacaaaaacgttacaaagatatgaatatgtggctaacttttttaaatcaagtgatgaataataatgcttttatataaggagttatcaaaatgagaatgcgctataagccttgggcagaggactacttaaaaaaagaaccgaatatagttgatatcgatggtagtcatgcagggcgaatcagtgaatggtttgataatgatcaaccgatttatattgaagtaggatcaggtaggggtcaattcataactacgcttgcagcaaaacatcccgaaataaactttatctctatggaaagagagaaaagtgttatgataaaagtcttagataaagttattgaacaaggcttaacaaatatcaagttaatttgtaatgatgcaattgaacttaacgattatttcaaagatggagaagtatcaagattataccttaatttctcagatccatggcctaaaaaaagacatactaaacgtcgtttgacatatcaaacatacctagcattgtataaacaagttttaaaagatgatggtgaaatccattttaaaacagacaatcgtggtctgtttgcatatagtttagaaagtatgtctcaatttggtatgtattttacaaaaatcaacctgaatttgcatgaagaagatgatgaagagaatattgagactgaatacgaaagaaaattttctgataaaggttcaagaatttatcgtatggaagctaagtttcattaaatataattacgcactcaattgataggacataggttctatcaatttttttatgtccaaattaagatttttataatttaatgtaaatagaattgtgctaatttaaatgtacttatgtccaatattttacctagaacattgtttgtattactattaatattaagtagttattgtgtttatattttacgaggaggataagtagatgaaattaggggattttcgtatacattatttaaatggtggtatcactcacattgatggtggcgcaatgtttggcgtggtgcctaaggcgttatggactaaaaaatatgaagtgaatgataagaatcaaattccattaccaacgcatccaatattaatacaatcaaacgattataatattatcattgatacaggtataggttcaggaaaattaacagataaagaacgtagaaattttggagctcattatgaaagccaaattagtgaagacttaaaggctttagatttaacgactgcagatattgattatgtattaatgacacatttacatttcgatcatgctgctggattaacagataatgagggtaattcaatttttaataaagcaatccatgtgattcaacaagatgaatggcatgaatttcaaagccctaatatacgcagtaaatcaacatattggccaaagaataatggagattttaaaaaacgattactattgtttgaaaatgaaatcgaaatagtgccaggtattaaaatgattcatacgggcggtcatagttttggtcatgcaatcattacaattgaaagtcagaatgaaaaagcggtgcatatgggtgatatttttccaacaactgcacatagaaatccattatgggttacagcttatgatgattaccctatgcaatcaattagagaaaaagaacgtttagtaccgtattatattcatcaaaattattggtttttatattatcatgatgtgaattattttgcggtgaaatttgataagcaaaatataactgaatttgatacatttatttctaggaattaaaaaggttaaagctaagcggcacatgaataagaagatattctgagttagaatatgtttgtcatcgtgtcgctatggctttaaccttctatcatttgcattcaatgatatctaatatttcacctgttttggcatcagcataaaagtcataatatgtaagtgtgttatggtttcgtgtcgtaatgccaccttgaaaagcaatgatttttgaatcggattttgtatacgtcatcggcacttttaatatatatgatcctataacattcataaaataagtttttacttctttagtgattttttcaggatctcgatattggatatgttttcgacgtttataaaaataaattgatcctgcaattgtagttaggaaaaataataagaggatgaaccaattttttttatttaacatgacataatctacccccaataaagtcatatttatagtttaccataatgaagatgatataataaatattaaggagtgagagacgttgaacatagataaaagtaaaacattgaatagaatgaaaacattaacagaattacatggtgtagcaggttttgaagaaaatgtaaaatcatatttgaaagcagaaatggaaccatttgtggatgaatttgtttataatcgtatgggcggattttacggtgttaaacgttcgaaatcaagtaatccaaaacgaatcatggttgctgcacatatggatgaaattggtttcatggtcacaaatatcacgtcaaatggtatgctacaatttactaatttaggtggcgttgcaaacgatatatggcaaggccaaaggctaaaagttagaacgcgaaataatgatgagattacaggtattgtagctaatattccgaaacattttagaactggaaatgaaggagcacctaaaatagaagatttattattggatattggtgcagaaaatgctgaagatgtatcggcacgtggtattgctattggtgatacgattgcacctgatacgccttttacacagttatcagagcatcgatttgccagtaaagcctgggataaccgttatggttgtttaattggtattgagctactggaattattaaaaaatactgaattggactttgatttatatgtcggtgcaaatgtgcaagaagaagtaggattaagaggagcaagtgcagcggcagagttaatcgatcctgatgcagcatttgttgtagattgttcgcctgcgaatgatatgaaaggtaagcaaaatttatcaggggaattagctggaggtacattaatcagaattaaagatggtacaatgttacttcgaccaacctttagagattatttgcttgatttagcgaagcaatatgatattaaacatcaatactatatttctccaggcggtacggatggtggagaaatacacaaggcaaaattaggtatcccaaccgctgtgataggtgtgtgtgcacgatatattcatagtacaaacgcagtgtttgatattagagattatgaagctgccagaagcctgttagaacaatcagttagacatttaaatgaagaccaaatagaaatattacaatataaataataattaggagtggtattatgcaacaattagaaagtgagcagcaatttgaaaatctgaaaaatgaacaaacagtgtttttatttacagcagattggtgcccagattgtaaagttatagaaccagatttacctcaattagaagcaaaatatactaattataaatttatttcagttgatagagacaaatttattgatatatgcattaattatgacattatgggtatacctagttttctagtattctgtgacgggaatcaaattggcagttatattggaaaagaacgaaaatccatagaacaaatagaccaatttttagcgtctttgtaggtggcattaatttaggattaaattataaaaatatatacccttagagcgcacattttttctgttcctaagggtgtatttattgtaaactatagtaaggcacgtaaataggagtgttaataatgaatgtctttcaaatgagagataaattaaaagatagattgaatcatcttgatgtgaaatttagttttaatcgagaagatgaaacactacgtatctcaagaatagataatggtaaaggcgttaccgttaaaattaatccaatagtagctaaatataaatctcaaaaagaaaaaatagtcgatgaaattgtgtattatgttgaagaagcagtcgagcaaatgaaaggggaggcattggaaaatacggataatatccaaattatgccggttttaagatctcctagctttgataaaaaagacaaaaatggtaattcatttgtaatcgatgcacatacagcagaaacaaacatttattatgcagttgatttaggtaagtcatatcgtctaattgatgaagcgatgttagaagaattaaagctaacaaagcaacaattaaaagaaatggcgctatttaatgtgcgcaaattagaaaataagtatacaactgacgaagttaaaggtaatattttttactttgtgaattcaaatgatggttatgatgcaagtagaattttaaatacgtcatttttaaatgaaatacaagcacaatgtgaaggtgaaatgttagtagcggtacctcatcaagatgtgcttatcattgcagatatccgcaataagacgggttacgatgtgatggcgcatttaactatggagtttttcactaaaggattagtgccaattacatcattatctttaggttatgataaagggcattttgaaccaatctttattttaggtaaaaataataaacaaaaaagagatcctaatgtgattcaaagattggaagctacacgaaaacaatatgaaaataaagataagaaataaggagtaatgaagttatgaatttattttataataaagaagctgttggcgatgttgcatttttacaaattaatcctacagaaggtgaatataactacgtcactcaaggggatgtagttgaaatacagaatgacggagaagtcgtaggttacaatatctttaatgcatcaaacaaagcaacactaacaggtaatggacatattaagttgactgaaacattagttcaagcgtttcaaaaagcaattgaagctgctggatttacttataaattagacgcagactttactcctaaatttgtagtgggctatgttgaaacaaaagacaagcatccagatgcagataaattaagtgttctaagtgttgatgttgcaactgaaaaactacaaattgtttgcggggcaccgaatgttgaagctggacaaaaagtggtggtagcaaaagttggtgcagttatgccaagtggtatggttattaaagatgcagaacttagaggcgttgcatcaagtggtatgatttgttcgatgaaagagttaggattaccaaatgcaccacaagaaaaaggtattatggttctaagtgatgattacacggtagggcaatcattttttgaagtataaaaaggaggtaatgtagtatgagctggttcgacaagttatttggagaagataatgaatcaacagataattatcttaataaaagaagccaacgacgtcaaaaagctacacaaaaagaagaacatgattcattacttcctcaaaataatgatgtttatgaaagacccaaagggaaattcaggtttcctatgcgtgttttagaagaggcaaatgacagtttgaagacagatgatgagttgaattctgatattgcgtctacatctcataaaacttcccatgatgcacataatgatgtgagtcatgggaatgcacatcatcaacaaagaagacgtagacatatgtatgataaaacactaactcaaaatataaactcgagtgattcagttgggcaacaatcgcaacaacaagatcattaccaaactgaaaatgagactagaacacataaaggcaaaagaatgaggattcaaacggatgttttacgagcaaatgcttcatcaaaacacaaaccaacgacgtcaaattttcatcatagcgattttaaagcgagtgaagtgccttcagcgatttttggtactaaaaaaccccgtcctttagaaaatggtgtcattaaacgtcaagatgattcagaagaaggtacgcaagcggaaaatgagacgaatcatcgtaattataatgatgaatcatctcaacagaaacaccaaacagtaaaagattcagatagtaattcaacagatattcaaaatgaagcacatatgtatcatgaaaattcaaatgatactgcatatgatttatctgataacaaagagcgccgtgacgcacaacatgttgaggaaaatggtgaagaagttgagctgaatcaaccagtaacaagtcaaaataaaaaagataatacgattaaaatagaaaacatctatgcttctcagattgttgaagaaattagacgagagagagaacgtaaagtattacagaagcgtcaatttaaaaaggcacttcaacaaaaacgtcatgataatcaagacaaacaagaagatagtatacaaaaagcaattgacgaaatgtatgcaaaacaagcgcggaattacataggtgaaagctcgttagatgaagatggtaacgcaatgaatatgtccaaatcgaaaacgtcaacatcatgtcaaagtgcagaaaatcagcaacaaacagaatcgacgaatagtgaagatattgaagaagattcaaatacaccatttaattatgaagaagttgatttagatcatgtacgcgatgttcatacgattaataatgaacaggttaatgtaaatactaaaaatgacagttccgcaattgaagcagatcaaaatcaagttgaacaggtcacacctaacagtgatttcgaaaatcaaaacgatgagaacaacactgcaatagagtctagtcaaagtgatatgtcagaaaatgagcgcacatacatattagagaaatcgtttgagcgttatttagatgagaatgacgtggatgatgcgcagtatagagaattatctgaaacagaccctaaatccaaagaatcattagcttttgattcattagattcacaaagtgaaaatgagcaattgtcagagtcattatcacaaccagaccatggttttgaaaattcagagtccgatattatcgataatcatgtaacttcaaatgatgcagcaccatcagaggcatcacagctagaatctgatgaaagtatgaatgaaaatgaatcgcttaacgtccaaaatgaaatattagatgaaaggtctgaattggagcaatctgatagtactgataataataatggaaatcatattaagcaacccgacgaaactaaaacgtataaaaaggctacatctatcaagaaaggtagtaaacctttcaatgtcgtgatgacaccatcagataaaaagcgtatgttagatgcacaaaaagaaaaaaataagtcaaacatacaattaaataatgtagataattttaaacataatacgtcatccgatattagcgacaaacaatcacagtcgaataatgatcaattagcaaatgaacctacttcagagtcattgactgtaactgatgacaaccaaagcgaaacgaatttatcacatgacttgattgatgaacagagtgactttaaaccagaaacggatgcttctttttatagtgatgattataatcgaaatgactcaactcagtctaatgtacaacaagagtcagttgaaagtgctgagtcagatatgacaaatgtgccttctgaacaaaatgaaaatcataagcaaaatgtacaagaaccagttctcaaacctgaaacttctggtaaccaattaggtggagtaaatacatcaactgaggatgataataaggctactattagaagaggacccaatattaaacttccaagtattgagttattagaagcgccaaaacaacatgaaattgacaatgcttggattgaagataaaaaacaggaattgaatgaagctttttattatttcaatgtgcctgcagaagttcaaaatgttacagaaggccctagtgtgacacgatttgaattatcagtcgaaaaaggtgtgaaagtatctagaataacagctttacaagacgatataaaaatggcgcttgcagctaaggatattcgtattgaagcacccattccaggtacgagtctagttggtatagaggtaccaaatcaaaatgcaacaactgtaaatttacgttcaattttagaaaaaccagcgtttaaaaatgcagaatccaaattaactgtagctatgggacttagaattaataatgaacctttattaatggatatttctaaaacaccgcatgctttaatagctggtgcaacaggctcaggtaaatccgtatgtattaatagtatattaatgtcgttattatataaaaatcatcctgaggaattaagattgttacttattgatccgaaaatggttgaattagcaccttataatgacttaccacatttagttgcacctgtgataacagatgtaaaagcagcaacgcaaagtttaaaatgggctgttgaagaaatggaaagacgttataaagtttttgctaaatatcatgttagaaatattacggcatttaataagaaagcaacttatgaggatagaatgccaaaaattgttatagtaatagatgaattagcagatttaatgatgatggcaccacaagaggtggaacaatctattgcgcgcattgcacaaaaagcacgtgcatgtggtattcatatgctagttgcaacgcaaagaccttctgttaatgtcatcactggattaatcaaagcaaatatacctactagaattgcatttatggtatcatctagcgtagactctcgcactatcttagatagtggtggtgcagaacgtttattaggttatggtgacatgctttacctaggaagcggtatgaataaacctatccgtgttcaaggtacatttgtctctgatgaagaaattgatgatgttgtagatttcataaaacaacaacgagatccggaatacttatttgaagaaaaagaattattgaaaaaaacagaaagtcaaccacaagatgatttattcgatgatgtgtgtcgatttatgctaaatgaaggacatatttcaacttcattagtacagcgtcatttccaaatcggatataatcgtgctgcaagaattattgatcaactagaacaacttggctatgtgtcgggcgcaaatggatctaaaccaagagatgtatacattacagaatcagatttgaatgagaattaatatagagataaaggagtgttacaatgacacattatcattttgtcggtataaaaggtgccggtatgagttcattagcacaaataatgcatgatcttggaaacgaagtacaaggttcagatattaaaaattatgtttttacagaagtggcattaaaaaacaatggtattaaaatactgccatttgatgcgaataatattcaatcagatatggtagtcgtacaaggaaacgcattcccggatacgcatgaagaagttgtgaaagcacatgaattaaaacttgaagttattcgctaccatgacttcttaggtcatattattaaccaatatacgtcagtcgccgtaactggtgcacatggtaaaacttcgacaactggtttattatcacacgtaatgaatggtgataagaaaacatctttcttaattggcgatggaactggacttggcataccagcaagtgattactttgcgtttgaagcatgtgaatatcgtagacactttttaagctatcatccagactatgccattatgaccaatatagattttgatcatccagattatttcaaagacgttgatgatgtatttaatgctttccaagaaatggcgcataacgttaaaaaagcgattattgcttggggtgatgatacacacttgcgtaaaattgaagcagacgtacctgtttattattatggattttcaaataaagatgacgtttatgcagataatttagagataagtgaaaaaggtacaaaatttgatgtatattttaaaggtgaatattttgatactttcctttcaccacaatttggcgatcataatatattaaatgccttatcggttattacgattagttacttagaaagtttaaatatcgataatattaaagaagcattagagacttttggtggcgtgaaacgtagattcaatgaaacaaaagtaggaaatcaagtattagttgatgattatgcacaccatcctagagaaattagtgctacaattgagacagcgagaaaaaaatatcctaacaaagatgttatcgcagtgtttcaacctcatacatttagtagaacacaagcattcttgggcgaatttgcagaatgtttaagtttagccgataaaacatttttatgtgaaatttttggttcgataagagaaaatagcggtaacttaacgattcaagatttagttcaaagaattgatggtgcaacattgattgatgaggaaagtgtaaatgcgcttgaacaatatagtgatgctgttattttatttatgggtgcaggagatattcaaaaaattcaacgtgcatacatggaaaaaataggtgttacttctccattttaatatgtttatgttaaaatgatgggggtatttatattaaataacaacatatgattaataggaggcgttttaaatggaatggattttacctatagctggaattattgcagcggttgcatttctaatattagtaattggtatcgttgtggtattactttcagttaagaaaaatttagatcacgtagcaaaaacacttgatggtgtcgaaggacaggttcaaggtattacgcgtgaatctacagatttacttcataaagcgaaccgcttaactgaagatattcaagacaaatcagatcgtttaaattcagtagttgatgctgttaaaggtatcggtgattctgtacaaactttaaatggttctgttgatagagtgacaaactcaattacgcacaatatttctcaaaatgaagataaaatttctcaagtagtacaatggtcaaatgtagcaatggaagttgctgataaatggcaaaatagaagaaatcgtagagatagtgcaaattacaaaacgagcagtgtagcaaatgacacgaatcatagctatactacacgtgtagataacaaataattcatatattaaaaaacaaatgcacttaaatgaggtttgaaacttatttaagtgcatttgttatagggggcattggacaatgaagtattataaccgtgataattatgaaagaaatttagaaagttacgaagtgccagaatattttacaaaaggtgccagaaatgaatttgtatatggatttattgtaggtgctgttataggttccgctgttggtttagtatccattagtaagtcgagagcaacgaataaatctattccagaacaagacaatcaatttaaatctagcattattgagcagtccgaattagaacgtcaagaagctgacgataaagtaaatgaaattaaatcaactattgatgacgcgcaaaataaaaatacagaagtaaccgatgcagaattatctgcgcaacgcgtagcgattcaacaagaaacttctgataataatttagctaatatgtcaccggatgcccaagaacaacaggaagtgacaactagtgaagatgcaaatcaatcagatgacagtttagcacatatagatccaaatgcagaaccaagtgaaagtgaaattaatgcacaacaaaatgcaattaaagaagaaacagaaacaagtgatgcgaatatagatggtgaaaactcaaatagcaatgcagttactgcaagtacagcagctggtggtgcagttgcagcgagtggattagctaaagcagcacatgataaaaatgaagcgttaaatgaagataatcaagttgcagaaaacacagctaatcttttaaaagaagaagcgcctgctaacactaacacgaataataaaacgccgaatttggttactcaaagcgatgaaacagatgatagtaagcaaggggcaatcgcaggtgtggtaactgcgtcaagtttagcattagcggctaaaaataaaaataaagcattagatgacaatacttctgttgcagaaaacacagctaatttacttaagccagaagctccagcacagacaaaacataaagttgtacctaatttggttacgccaaaggttgaaagtgctgttgaatctactacagataaagtagaacaaggcgataataaaaaaaatgatacaaaagttaaaccagaagccgcagaccaaagagtaaaacaaacacacaaacaagttgcatttaaagatggtatcatcgttcatgaaaatgcttctggtcaaacgcaatcagcaacaactgctacaaattcagattcaaaaaatgatggtatcattaatcatgatgattcagaatctgcagataacctatcatctacaaaagacgcaagtactttgacaaatgaaagtactactgaatctgaagcaacatattcaaaaaacagaccacaaacgaaaaaaacagaaaaagcaaaaagtaagattgataaaagaacatttaatgattaaaaatatttaataaaaagaatcggacgctttgttcgattctttttttatgtagtattatttgatacatatctatttgcttaatagaacatcatgtaaagcgtatcgttgattaaatatgacatgtcttatgaatttgaagcatatcatgaacaaggaatttgtaaatttatctataaaatttataaaaaagaagtaatagtgtaaaatataactagaaaatgactgaaaatttagttatcattaatgttattcactttttaagtgaatttttaataatccttacttgaacttataaggagttattgttagaataacctttaacatatattttatcgctttaaagcagaataaatattggttttaaaatttttcatagaggtgaataaaatgacagacaaattacaagaatacagagatgagatagttgaaattaatgaaaaaatcttaggtcttttatctaaaagaggtaagatagcacaaaagattggtgaagaaaaacgcaaacaaggtacacttgtttacgacccacaacgcgaaaaagaaatgattaatcagttattagatcaaaatgaaggtccatttaatgacaatgtgattaaacaactattcaaagaaatttttaaagcctctactgatttacaaaaatctgaaaatgaaaaacatttatatgtatcgagaaaattaaaaccagaagatacaatcgttcaatttgacaacggaggcatcattggagatggcaacaaatcatttgtatttggtccatgttcagttgaatcacaggaacaagtcgatgcagtcgcagctaatttacaagcgagaggtgagaaattcattagaggtggcgcatttaaacctcgtacatcaccgtatgatttccaaggcttaggtgtcgaagggcttaaaatacttaaaaatacgaaagataaatatggtttaaacgttgtaagtgaaattgtaaacccagcagactttgaagttgctgatcaatatttagatgtattccaaattggtgcacgtaatatgcaaaactttgaattattaaaagaagctggtcgttcaaataaacctgtattattaaaacgtggtttatcagcaacgattgaagaatttatttttgcagctgaatatatcgcatcacaaggtaatgaaaatatcattttatgtgaacgtggtatccgtacttatgaaaaagcaactagaaacacgttagatatttctgcagtgccaattttaaaacaaggcacacacttaccagttatggtagatgttacacatagcactggtcgtaaagatattatgctacctactgcaaaagcaggattagctgttggtgcagatggtattatggctgaggttcaccctgatccatctgtagcattaagtgatagtggacaacaaatggatttaaatgaatttgatgcgttctataaagaacttaaaccattagctgatatgtataataataaacaacttaaataaagtattacgttaattaaaatgaatgccttataatcctaactatttagttagtatggattataaggttttttattttaaaaacatttattaataattggtttatttttaataaaaagcgtatgaaatgacgtatcattcattaagttataaaaatcgattaaagataaatagacgttcatatcatatgaattgaattatttatgaattttaaaaacaaaatgattttacaatgagcaaaaatatggtaaactttgaaaatattatgaaaacaagttacaatgataaagaaatcgttttcaaggaggaaaatatgactgtaacaatatatgatgtagctcgtgaagctcgcgtttctatggcaactgtttcacgtgttgtcaatggaaatcagaatgttaagccggaaacacgtgataaggttaacgatgttatcaaaaaattaaattatcgtccgaatgcagtggcaagaggattagcaagtaaacgtacaacaacagttggcgtaatcataccagatatttcaaatgtttattattcacaattggctcgtggattagaagatattgcaacaatgtataaatatcattctattatttctaattcagataacgatccaaataaagaaaaagaaattttcaataatctacttagtaaacaagtagatggtattatcttcttaggtggtactatttcagaagaaattaaagaacttattaataaatcatctgttccagttgtagtttcaggaacaaatggtaaagatgaaggtatttcatcagttaatattgatttcaaaacagcagcaaaagaaattactactgaattgattgaaaaaggtgctaaaacatttgcgtttgtcggtggcgattattccaaaaaagcacaagaagatgtattgactgggctaaaagaggttttagattcaaatcatcttgaattaaaaaatgaacttatttttaatggcaatgaaacttacaaagatgggctacgcgcatttgaatcattaaaatctggaaaaccagatgcgattttgtcaatcagtgatgaacaagctattggtcttgtacatgcagcacaagatgaaggtgtgaacgttccagaggatgtacaaatcattagttttaacaacacaagattagttgagatggtaagaccacaactttcaagtgttattcaacctttatatgacattggggcagtaggtatgagattattaactaaatatatgaatgaagaagaaattgatgaaccgaatgttattcttccacatagaattgaatatagagggacgacgaaataaatcgtcaatgcgttttaaagcaaatatataaattaaagcctacacaaattattgtgtaggctttaatttatactctgagctagtacatattgaagatgagcttttttgtatttattatattttgaaaggtcatgtatatctgggatacggtgtgaacatgtatttttcacccatagtagggtgatgaatctaagcttaacagtaaatgcttctaaaatttttaacatacaatgttttaggcggatttcttcaaaatgaccaagttgttcaaattattattttaactataaatcttactatttaaaccaactaattacctgttgtgcatgttttaaattggtagctgtaatttcttcctctctaggtatatcgatgtaattttctttatcatcctgccagtgctttggtaaagtacaggtagcataaggttgccatttttcaagccattgtgagggtaattgaccttgtggtggtggtgcttctataagcgctaggaatacgtgtgaccaagctcttggcactactttccaaatgttataaccgccaccaccaaacatcatgactttgccatttgtatatgtatcagccaaagatttaatgatataaggaatttggtaaagtgtgtttaatgtacaactcatatgtgttagtgggtccaaataatgcacatccacaccatgaacactaacaatgatatctggtttgaaagaagcaataataggttcaatcgtttgcttaaatacctctaaataagagctatcttctgtgtatggttctaaaggaatattaactgtatagccgaaaccttgctcattaccacgttctgtgtaatgtccagatccaggaaatagaaatttgcctgtttcatggatcgaataaattaaagcttggtcttcagtgtaaaaactccactgtgtaccatcaccatgatgtgcatctgtgtctatacataatacacgttgattatagtgtttaatcaagtaagcaatagtgatagccacatcgttatatatacaaaatccatttgcacgacctggtagactatgatgtaagccacctccgagatgacaaccatttttaacgcttttatccatgatagcatcagctaaatttaacgcaccaccaacaattctagcgctatgttggtgcatccgtctaaattgcaatgtatcatcaccatctaagccatattttttagcttcttgtaaatttaaaataccatgggacgcacgtctaatggcttgtatgtagtcataagaatgtattagtgataattcctcatctgttgcgattctcggtgttatgatgtgttcaggctttaaactgcctagatctaacaataattctgtagttagttttaatctcatttgattaaaaggatgatcattgctaaaacgatattgaagtaattcatttgcgtatacatagcccgtagtttgttgcatattactcataaatttctcccctttaaaagaaaaagcgattcataaatctgatattatcaaattcttgtaattgattgattgaaatacgtgaaccaattcttgccattaaacaatttgcaggatgacttgtaatttcagggtcatcagtagcaaaaatttcaaggcccccataacccattagtttttgcattagttttttatattcatatacgtcgagaccagaattttttaaatcccagtgccagtaatattctgtagttaatacgatataatcttcatattcatctgcttttaagcttaatttgataagttcacttcctaaatgtaaatgtcgataaggcaaactgatttcaatagcaccaagttcgattaaataatctagattgccactagaccaacgttcgagtggatctggatagtgataagtcacataaccgatgatatgttgtgcttcatgtaagacatagatacgaccttcttctagttcactgatttcttttattgcctcaaattgatctttaggtggtcgaaatgcatataaaccatcatcaaacgtcatcgtatcgagtgaagaaagtggtacaggaccttctattataaaatcaccttcatttaagtgataggtttgagattgatatgttttgatatgtttcattttttcactccaaactaccgcatataatatagtcaacaagtttgttatctacattataagttaaaaagaggaaaaataacatataaataaatacgcttacacttattattttgaaaattccgataacattcgttataataatttttaagcaagcgatttcattcagagggggatttaaaatgaaagtagaagtttataaaggtgaaagtggagattttaaccttcaagactatgaaaaagaatacaatcattttaactggaaagatgtagaaaaatcattttcatggtacgaatctggcaatgttaatatggcacatgaatgtatagatcgtcatgtggacgaaggcaaaggggataaaattgccttacattataaagatgataaacgtaaagaaagttatacttttgaagaaatgaaaatcaattcaaataaagctgcgaatgttttaaaagaaaaagcaaatgttgaaaaaggagatcgtgtttttgtatttatgccgagaacaccagaactctattttgcgttgtttggaactttgaaaataggtgcaattgttggacctctatttgaagcatttatggaaaaagcggttggcgatcgtttacaaaatagtgaagcaaaagtaattattacaacgaatgcgttacttcctagaattcctaaagaaaatctacctcatttagaaacaattgttgtcgtagacgaagccgttgatgaaaactatgtcgattttaatagtgaattccaacaagcaagtgagtcatttgatacagaatggttaacaatggatgacggtttgatacttcactatacttctggttctaccggacaacctaaaggtgttttacatgcacaaagagcaatgctttttttttatatatcaggtaagtatgtattagattttaaagaggatgatgtttattggtgtactgcagatcctggttgggtcacaggaacatcatatggtatctttagtccttggttaagtggtgtaacaaactgtattgctggtggaagattttcaccagaggcttggtacagtatgattgaagaatttaaagttaccatttggtatacagcacctacagcacttagaatgttaatgagtgcaggggatgatgtagttgaaaaatatgatctttcttcaatcaagagtattttatctgttggcgaacctttaaatccagaggtcattaaatgggcaaaagatgtctttggcaaacgtgtactcgatacgtggtggatgacagaaactggtggtcatatgatcgtcaattatccttctatggatgtaaaattaggctcaatgggtaaacctttaccaggggtagaagcagcaatcattgatgatcaaggtaatgaattaccagcgaatcgtatgggtaatctagcgattaaaaaaggttggccatctatgatggtgtccatttggaaaaatccagagaaatatgattcttatttcattggagattggtatgtatcaggcgactctgcatataaagatgaagatggctattattggttccaaggccgtgttgatgatgtgattatgacagctggtgaacgtgttggcccatttgaagttgagtctaaattggttgaacatgaagcagtagctgaagcgggtgtaattggtaagccagatccagttcgtggtgaaattatcaaagcatttgtggcgttacgacctgattatcaagaatcagatgaacttaaagaagaaattcgtaagtttgtaaaagaaggcttagcggcacatgctgcaccaagagaaatcgaatttaaagaaaaattaccaaaaacacgttcaggtaaaatcatgcgtcgcgtattaaaagcatgggaattagatctgccagaaggcgatttaagtactatggaagactagtataaacgataaaagacgagttgaatttacatgctaaagtgaaatcatatttaatttattatcgtagctatcaaatacaattgtataaatgattaaaatgaaacaaaagctatatccttaaacatttaaagggtatagcttttattaatttaaaataataccaacttagcaatatttagcctattaacaataagtcgttaattgattcaagatagtgatttaaagtaattagcactgcaatttaaaattttagtttcttcatttacataaatggaagtactgaaaaaatttatagaaagcagatgtattaagcattatgataaactacgatatctaagtaaagtaagttaccatgattaatgaattaaaactcatagcgacatatggtgtaatagtgcaatataagtatatgtttttagtttaaatttacaattttacacatataaatttgaaagcgctatctctatttgtcgacaatgctatttaagttggttaaaattaactatgtaaggaattattttttatcagtagtatatatcactagcatataaagattattgatttaaaaatttattttaagaaggggcgaatgaatttggcacatttatctgatttagatattgcaaatcaatcaacattaaaaccgataggagaaattgctgagaaggcgggaattccttcagatgcactagaaccttatggacattataaagcgaagattgatattaatcaggtacaacagaataatggcaaaggtaaagtagtgttagttactgctatgagtcctacgcctgctggtgaaggtaaatcaactgttacggttggtttagcagatgcattcaatcaacttaagaaaaaagtaatggtcacacttcgtgaaccagcattagggccaacattcggtatcaaaggtggtgccactggtggtggttatgcacaagtattacctatggaagacattaatttacactttaatggtgacttccatgcgattactacagcgaataacgcattatctgcatttatcgataatcatattcatcagggaaatgaattggagattgatcaaagacgtatcgagtggaaacgtgtattagatatgaatgaccgtgcgttacgtaatgtgattgttggactaggtggtcctacacaaggtgtaccacgtgaagatggtttcaatatcacggtcgcttcagaaataatggccattttatgcctagctaacgatataaacgacttaaaatctaaaataagtaatattacaatcggttatacacgtagtcgtaagccagtaaccgttgctgacctaaaagttgaaggtgcgttagcgatgattttaaaagatgcgattaaaccgaacttggtacaaacaattgagggaacacctgcattagtacatggaggcccatttgccaacattgcacatggttgtaattcaatcttagctacagagacagctagagatttagcagatattgtagttacagaggctggctttggatctgacttaggtgcagaaaaattcattgatatcaaagcgcgtgaagcaggttttgaaccatctgccgtagttgtcgttgcaacaattcgtgctattaaaatgcatggtggtatagctaaagataacttaaaagaagagaacgtagacgcattaaaacaaggtatcgtaaacttagaacgccatgtgaaaaacgttaaaaaatatggcttagaaccggtagttgcattaaatgcgtttgtacatgatacagaagcagaaactgaatttgttgaacagtgggccaaagaaaatggcgtgcgtttagctctaacagaagtttgggaaaaaggcggtaaaggtggtatcgatttagctaacgaagtcttagaagtcatcgatcaaccacaagatttcaaacatttatatgaattagaacaaccgttagaagataaaattgaaaccattgtaaaagaaatttatggtggtgccaaagttgcatttagtagtaaagctcagaaacaattaaaacaatttaaagaaaatggttgggataactatcctatttgtatggctaagacacaatattcatttacggatgatgctacagagttaggtgcaccagagggttttgaaattactattcgtgaattagaagcaaaaacaggtgcaggatttattgttgctttaacaggtgcaattatgacaatgccaggtttacctaaaaaaccagcagcattaaatatggatgttacagatgatggacatgcagtaggtttattctaatagtttaacggcacaatgaaatgttgttaacagacatttttattaactataatggcaatctaatgtgctcgcgcattaggttgctttcttaatttattgtctatacgcttacgatgttaaaagtcacatactactttaaaatttcgtaggcatagatatgactctaatctaaaactataaaaaatcgctatgaaataattaactgatacagattattttatagcgatttttatgtatttattttgtcattaaatgctttttgatatcaaatttttctgattgattaaattcatgctgtgttattttcttttcaactaacatacgttttaatacataatgttgtctattgatgcctatttgaatttgatcatctggtttgaggacaccatcttcttgataaggtgtgtaataataaggactttgtaataaaccaatgaggtatgcagattcagcaatattaacttctgaaggtggctttccaaacaaactataggaagctgatgaaataccagatatattagctccattataatcacgaccaaaaggtacaatgtttaaatatgtatatataatttcatcttttgttagtaaggtttcagcgcgcatagacaacacaagctcatttgcttttcgatcataagttttttcgttggttaagacttgattctttactaattgttgagtaattgtactgccgcccgttgctgcatcggtattaaataaatcctgtccaactgctcgcagtaatgctttaggtaaaataccattatgtctataaaataagctatcttcggaagctgttaatgctttaattatatttttattaacatttttaggacccactattaatgggtttaatgattggttatattcggaaaggatatgttgattactatagttaatatcctgagtaccgggaatattaagcaatttcaatcttagtgtattatcagatatgtgttctgattctttagtgatgctttgaaaataaaatacagtaatgactaatagtatgattaaggtacatgtaagaatcgtaaaaaaaccaataaaaatatgtttgagttttttgtaaatgatttcaaatttttcatactttgatatttgcggttgatgttgtaaattattttcaactttttggtgcgtcatatgttgcctccttatttaagcaacattataacacaatttatgttattgacttttaaattatagttaattataataagtatcaattcgatatcgtttttggatagaggagaagtagcgttttgtgtaaactaaagagagttagtggttgctgtgaactaatgttacataatttgtgaatacaccttaagtttttaatgaatccaaacgttttagttaatgaacgtatcattaataaagttatttgacttaaagtatggtggtaccgtgcgcatgcgcccttacattaatttgtaagggcgtttttctatttttttagaaatctatatatgttgcaatttaacacatactacttaactcgaacttttattcaaagcgatatcttaattaatacaggaggttgatacaatgacaaacgcactattagaagatttaaaatggagaggtttaatctatcaacaaacagatgagtctggaatagaaaacatcttgaacaaagagcaagtgacattatattgtggtgcagatccaacagcagatagtttgcatatcggtcatttattaccatttttaacactacgccgctttcaagagcatggacatcgcccacttgtattaattggtggtgggacaggtatgattggcgatccttctggtaaatctgaagaacgtactttacaaactgaagcacaggtcgaaacaaacgtacaaggtatcaataaacaaatgcataaaatatttgaatttgatactgaaaaaggtgcaaaacttgttaataataaagattggttaggacaaatttctttaatcgactttttacgtgattatggtaaacatgtaggtgtgaattacatgttaggtaaagattctattcaaacacgattagagcacggtatttcttatactgaattcacatatacaattttacaagcgattgattttggtcatcttaatagaacgtacaattgtaaggtacaagtaggtggctcagaccaatggggtaacattacaagtggtatagagttaatgcgtcgcatgtacggtcaaacagaggcttatgggcttactattcctttagtagtaaaatcagacggcaaaaagtttggtaaaactgaagggggcgctgtttggttagatgtagcaaaaaccagtccttatgaattttaccaattctggattaacacgacagatgatgatgttattaaattcttgaaatacttcactttcttagaacaagaagaaattgaagctttagaaaaatcattaaatgaagcaccacatttacgtgaagcgcaaaaggctttagcagaaaatgttacgcgttttatacatggtcaagatgcattagatgacgctattcgtatttcacaagcgctatttgctggtgatttacaatcactatctgcctcagaattaaaagaaggctttaaagatgtacctcaagtagaattaagtagtgaaactagaaatattgttgaagtcattgttgagactggtatttcatcttctaaacgccaagcacgagaagatgtaaacaatggtgctatctatattaatggtatcagacagcaagatgtaaattatgaacttacaagtgaagataaaatcgaaaatgaattcacgattattcgccgtggtaagaaaaaatactttatggttaattacaaataacatatttaaacatgatcgccatcctttgaatgaatgtttcaagggatggcgatcttttctattgagtagtagatgaatgaatggaaaaagtaaagtctcactgttttaaagaactactaattcatatgaatgtgaaagtagttttaaaaagcagtgctaaaaatagtttgatagtacgatagatttttaagatttagtatccaatatatataaagaaaagtctgagacattcatggatgtcccagacttaaaaccaatatgaaatattaacttaaatagcttaccttatatttaattaaaaggtgacgaactttcactttcagaactatcattgttattcgatgatttttgttcttttaatgttacttttatattttgttctttaccattacgttctacagttaaattcactgtatcaccgggttttttatttgcataaagataggagcgaacatctgtatcttctttcacttttttgtcatcaatttgtgtaatgatgtctccttctttaagaccattgtttccttcaactttagcgatatatacgccatctttacgtgacgttttcagttggtctttatactgttctggaatttcacttacgttaagtaaaccaatgccgatagaaggacgttctattttaccattttctacaagttctttaatagttacttttacttcgttactaggtattgcaaagccgataccttcaacttgttcacttgcaatcttcatcgaattaataccaacaaggttaccgttgatatctaccaatgcaccacctgaattaccagggttaattgccgcatcagtttgaagtacatttactttattagatccagcggatgtttgtgtgtcaatcgtacgttcactcgcagagataatgcctgatgttacagaattagcaaactctaagcctaaagggttacccatcgcaaaaacactatctccggtttttacttttgaagaattagcaaagtcaatggctttggtacctttgctatcatttattttgagtacggccatatctgttaacgcatctttaccgattaatttagcatcgacttgtttagaattatgcaattgtactttaatctcactcgcaccatcaatgacatggttattggttacaatataagcagaaccattatttttttgataaatgacacctgagccaacgccagcttcttgtgatttatttgatttaccttttaaaaggtcatttaaattttgtgctttctgcatattgattacaccaacaatagcaggggaaacgtcattaatcatttgattaactgaatcatatttatcgcttttaccatctaaggtatttccaccgctattatgattagaagcttcgttcacatcggaaccaccattatcaagtaccgtgctttccataagtcttcccactcctagaacaattaaggcaccgataatgcctgcaactaaggcaacaattatggttttaaaccacgggaatttaggtttgaatctcttttttgatggctgagtcgtttgtgttggttgctgatttgtattattttcattgttaaattctgacatatgctacctccgataattactctatatcctattatgaaagttttatacaactttttctagtatatcactatacgactttagactgaaatataaatctccttgttcataataagactaagtgataaaatcaataagtaaatattagcaaaacgaagtaggtgcgaagatgtataaatttataagtggtctattggaattgatcatactgaaaataagtaaatcattagaagttcaaggaaaagaaaatattccgcaacttcatagatatgttgtgacatgtactcatgaaagctataatgaagtgattatgttaggaactgcaatttatccaaatcaaattcattatatggcgaagaaagaattgtttaataacaaatggtttggcaagtttttatcttctcttaatgcgtttccagtcgatagagaaaatccgggaccgagtacactaaaaaaacccattaagttattaaaagaaaataaaacagttggtatttttccaacagggcatcgtatgaaatatgatgaaggtgcaccaatgaaaaggggtgcagtaacgattgctttaatggcgcaagccccaatattaccagcagcatatgtgggtcctaaaaaaatcaaaggtttagttactgggaaagccattattaaatttggtgaaccgattgaaactaaaaatttaccaaaaacaatgaaacgtaatgaaaaactagaatatttaacaaaagaattagaaagaaaaacaatacaattacaatcggaattaaatgattatgtaaaaaataataattaatattcaatttttttgaaatagtaagactattatatttttatacgtaatttttaaattatgtgttattatgtaattgtacaatgacagcgagtaaatcgtttacatacaccacgtggactatactgtgcatgtggtgtttttatatgtaattaactatttgaaatggggaattgttatgtttagtttctttcaaagactaggtagatctcttatgctaccggttgcagttttaccagcagcagcaatcataataggtatcggtaacgcattattggcattggggatattaccgacagtagctgcattcttttcttctgcaggttctacgatacttgagcaacttggtatcctctttgctattggggtagcattaggtatggctaagaaaaatgatggggctgtagcacttgcggcagctgtaggtttctttttaacgacagtagtattgagtccagaaaaattggcgccgttactgggggttaaagagacgggtgtggatgcagcatttgaacaaatgaataattcaaatgtttttatcggcttaattattggtttaattgcagcatatacctacaataaattcagtaaaacagaattaccaatagctttatccttctttagtggtaagcgattagtaccgattttaacagctttttttagtattattttggctgtaatcatgttatttgtttggccgttcattttttcagcaatcgttatatttgggacatggattttagacttaggccctgtaggtgcattcttgtatggtttcttcaaccgtttgttaattccgacaggtttacatcacgctttaaactcagtattttggtttgatttagcaggtataaatgatattgcaaaattccaaactggcgatggtgcagttcatggtgttacaggacgatacatggctgggtttttcccagttatgatgtttggtattccagcagcagctttagctatgtatcatactgcagaatcaaaacagaaaaaacgtgtatatggtttaatgtttggtggcgcaatttcagcattttttgtaggtgttaccgaacctattgaattttcatttatgtttgttgcaccaatactttttgttatccatgcattattaacgggtttatctatgtttatagcagcactatttcactggacagctggattttcatttagtgcaggattaattgactatgtcttgtcattaatcaatccagtatctaatcaaccttatatgctacttgtacaaggcttagtattctttgttatttattatgttgtatttagacttgctataaaagtactgaaattaaacacaccaggacgtggcgataatttacttcctgatccaacatcagatgaagctacaacaggtgatgttgatgaaaatgaaacacaaactaaatcgacaaataaatattcgcaaccagctaaacaaattttagaaggtcttggcggcaaggaaaatattatgtcattaacaaactgtgcaacacgtttacgaatggaattgcatgataatagcgtaattgatgaagctaaaattaaaggcgcaggtgctgtaggtgttacacaaagtggtaaacataatacacaggtcattattggtacgcaggtacagcaaatcgctgatgaaatagaagtacaaatggaaaattaaatataatgcttgataagtctgagacatccatcattgtctcagactttttaatcgcttcattattggaaaaggaaaaatttaaataatttaaaaattttatctttgaccgcttttattttcacatgatttatcttgaaaatacattgctcttttcatagtaagatagtaagatatactagtatcagaattttctgattaaaggagagttggtataatgaagtcggtattatttgatgttgatggtgtttttttaagtgaagaaaggtgttttgatgtatctgcactaactgtttatgaaatcctgatgagtgagtcatacataggtttagatacaactgtacagtttgaaaatttaagtgatgcaaaaatctctgaaataagagctattgttttttatcatgatgaaatattaactaaattaaaatcgttaggcttaaattccaattgggatatgttgtttgtcgttttggcaatccattttattgaaatttgtaagacattgccttctgaagatgtcaatcgcgtgctcgattctaatcaatttggacaagagacgtttcagtggataggtgaaaaaattgaaagtgtttctttagattttacattgccactatcattcctagatggtgtaacagcaggtaaggaaaatatttatcaagatttaatacattatgcgagtgaacaattaaatacgacaaaaacagccgtatttgaactgaaaagtccgttctggatgcttgcacaagaagtttatcaagaatggtatttaggacatcaacttttcaacgagatagaaaagaaagaaaaccggtctgactttaaacatggctatatatataatgaagtcgtgttacgacctgtatcagagattaagcaattattagcagatttaaagtcggcaaattatcatattgccatagcaactggcagaccgagaactgaaacaattgtgccttttgaaacaataggtattaagtcttactttgatgaagtacatattgtaactgccagtgaagttttaattgcagaagatttatatccagaattaaagcctttaggtaagcctaatccatttagctatttagcgacattggaagggaaccatcaagataaatatagacactatgctactaatcaagaaaatcgtgtagacaaagatgaagtctttgttgttggcgattctttagcagatttattgagtgcgaaaaagataggagcaacatttatcggaccgttaacaggtttgaaaggtatacatgcacgtgatgaattagtagattatggtgctgattatattgtcgatcatgtaggtgagattagaaatattttattgtaaaaataacctgttacaatcgtatattagataaaaaagcagcttaacccttcgctttataaggattaagctgcttttattatttatttaaataatataatttgcatctggttctatttcaagttcaacgcttctaattaaattgaaaccttcaatttcatataagccatctataacatcatcagtaactggatgatcaatagataaaatcattaatgcgttaccaccttgattaatacgaccaaggtgcatagaagcaatattaatgccatattcccctagaatttgaccagtacgacctacaatacctggtctatcattatgattgatgacaagctgatggcgctctggtttaaagtcaacgggatagtcattgattcttactattctagggccgtatccatttaatactgtagcacctattttaatttgtgtatctttgtttataagggttaattcaatatagttactaaacccacgatgttttgcatttttttcaatattataagacacaccttgttcattaagaagtacgagtgcattaattaagtttacacgctctgctagatcttgttttaatacacctgatacgagcgtacgcgtaagtaaacttgtgtcatctagagcaatgtcgccttcatatttaatatgcaattcacggggtgctttttcaagcaattgtataccaacttcaccagtaagttgacttaattcaatatatggttttaattcatcattaatttcactataagtcattttcggtgcattaatcgcattgaatacattaccattttcaaatatatcaacaatttcgtttgctactgatactgcaactttttcttgtgcctccacagttgaagctccaaggtgtggcgttacaataattttttcatgatttacaagaggggattccgttgctggctcactttcaaatacgtctattgccgcactttgtatttgattttgattaagcgcatcaaccaaagcggcttcatcaataataccaccacgtgctacatttataatttgcaaatttggtttagctttctcgaaaaatgctttacctacaatgccttttgtttttggtgtaagtggcgtgtgaactgtaacgaaatctgattgctctgcaatttcttcgacagtagctcgagtgacattcaattctttcgctttatcttcagaaagataaggatcaaatgctaaaatgtgcatcccaaagctttgtgcacgtttagcgacacccaaaccaattctaccggcaccaatgacgccaagcgttttattgtaaagttcagttccgcgatatgtcttacgatcccacttgccgtctttcaacgattgatgtgcctgaggaatattacgagccatggataaaatcattgccattgaatgttctgttgcagaaattgtattaccatcaggtgcgttaataacaatcacaccatgttttgtcgctgcatcgacatcgatgttatctacaccaacaccggctctcgcaatcacttttaaatttggggcagcttcaatgattgcctcagttacttgcgtttgactacgaacgataagtgcttgataatctgcaatttgattaataagttctgcttcatctaactctgtatcgatgacaacttcaaaatcattgtgatcgattaagctttttaaaccttctggtgagattggatctgatactaaaattttatacatatgctttgataacctccgtatactgagtaatggctgtgccaatataagattgatttctatattctgttaagagaatttctaaagctgatacgacttgtaatatatcgaaaggtgagatttgccccatatgaccaatgcgtaaaatttctccttttaaatggccttgaccgcctgcaatggtgatggcgaagcgtttttttagttctgttttaatataatttaattcttcttttgaattcggtataaaggcagtaacggtaggagaagcataagcttcgtctacaagaagatttaaatccaaagcggttaacgcttgtcttaacgcatcgcgaatagcgtaatgacgacgtataacttgttcaaatccttcttcatttactaattgtgcataagcattgacccctctaaacagtgaaacattcggcgtaaagggtgttgaatgttcagcttgtgattttagatatttatttaaatctaaatagaaacgtggtgtagtgacctcggcaaatctagctttcgcacgatcattatatgcgacaaatgccaatcctggtggtaacataattgctttttgacttcctgaaataagtacatcaatttgatctcgttctaaatccacatcaacagcaccaatacagcttacaccgtcgactacgtaaaaaatggatggatcataattttttaaagcatgacctaattcattcacaggatgtaagacggcggttgatgtttcacaatattgactgtagacagctgtgacttgtctattcaaagattttaagaaatctataaaatcgggtacattgacagctttaccccattcgacttcaaaaatatgtacattttcataataggattcagcaatttgtttaaagcgattaccgaatgcaccggaaacaataatcacaatatcatcttctgggttagctaggtttagcatacttgcttcaagagaacttgtaccgcttgaagttaagatgatgacatcgtttttagcaccaaagataggttttagtgcgcgaaatgcttcctccgctattgattcaaaatcacttgatcggtgtccaaccataggtaattgtgttgcgtttaatatttgttctggtactggtgtaggtcctggtgtaagtaacaatggatgataatatttcatgactaattcccccaatgcttaagattatacaagtttatcaaattttcagaaaataaaaaagcttttagttagaaaaaagggcgaaatagaatcaatctaaaaataatgtaagggtattcattgttaatttaatcatattccgtcacatataaatttttttgaaattattttatttttggtactatttttacttcaacgtttcctctcaaggaattagaaatcatgcaattgttgtctgcaacctttaacaatttagggagtttcttagttaaattatctttttgttcttgagatacataaatttctggatagtgtacgatattatccatgcgaaactttgcattttcaaaaatagctgtaccaatcgatgattgagcgattttaatatctgtgaaaccagaacgttccaaagcagctgctaatgaaatgatatagcaagaagaagcagcagaaacaagcaattcatctggattagttcctgtaccattaccccctaaacccgatggaatagaaatttgctcttctaaaatatcgccttgtaagttgccgactgtgtcacgaccaccattccaatttgtttgtactttaaattcatgttggaccatatcgattgacctcctgattaaatgtgataacttaagtttagttgaaattgagagataaagaaagtaggggggaaggtttgcaagataacaaatttaatcgccaacaatttgtattagttgcacatcgcggattggctactaagtatccagaaaatacacgcatcgcgttggaagttgccttaactagcaatatagatatgttggaaatagatatacatagaacaatagataatcatcttgtagtcattcatgataagacgatagaccgtacatctaatggcaaaggaaaagtaaaggcgtatacattagaagctttgcgacaatttgactttggcatatataaagacgaggcatttaaagggcaaataatcatgaagttagatgatgtcttagcaatggttaaagaagcccctcaaaaattattgatagaactcaaataccctaaattatatccaaatatagaaatagaacttctcaataaattggaggcatatgaaatgcctaaagaaaaggtgattattcaatcatttgatcaacaagtgattcaaaaaatacataacttaaagaaggggtataagttaggtgttttaattagtaagaaaaaatattggtacaggttacctaaatttaaacaaatcagtaaatacgcacagtatatcaatccacagttttcattagtgaatgaaacatttttaaaaagagcaaataagaacggattaatggtgatgccgtatacagtaaatgactctgaaacggccaacagactcataacgttaggagttcatgggttaatatcagataatccagaaacacttataaattaatttaaaactgaaatgaaacagtttgtataaagttatttatattagtattaaattagacataaaagtggccgagacagcaatgtatgtctcggcgcttttatgcctttgaaaaggaatagtaagatatatgaatgagcaaaagaaaagctcactttcttttaattttgtggatacgtgggatataacaactatacagttgttatattaaaaatcattacttttaatgtatattttaactcgtagctaactaacgaatgtgtgataaatcattatcatggtgatttatccagttcttttttagtaatcccattacaaaacaatcactgtattcgcctctagtataaaagtgttcttgtaaggtaccttcgatagtgaagttttgacttttataaatatggacagctttttcattgtttacatctacaaacaaatatattttatgtaaatttagtacaagaaatgcataatcaatggccattttaaaggcattcttagcaaagcctttaccactgaattttggatcaacaatgatttgaatctcacagttactatgtataaaattaatttctactaattctacaacaccaattcgtatatggtcgtgttcgataatgaatcggcgttctgattcatctaagatatgttttttatataaagattgaagctcacttaatgattgatagggttcttcaaaccaatatgacataatagaatattcattatttaagtgatgaacgaaatctaaatctgtttcttctaatgctctaataatcaagattaacactcctctatacttatagcatacgaaatgtcagaaggtttgtaaattaagacgttacatataataggggtgtatgtcagtttgtattaaaaaccaaaataaaaaaaaccaagaaatccgtaaaggacttcttggttgaaaagacaatgtttatcttgagtagtactcaacgataagttgttcattgatttcagcaggtaattcactacgttctggaacgcggatatatttaccttttaagttatctgcatcaaactctaagtagtctggtacgaaattgttaatttcaactgattcagcaatgatatctaattttaaagatttttcacgaactgagatttcttgaccaggttttaaagtgtatgatggaatatcaacacgtttgccatctacttcgatgtgaccgtggttaacgatttgacgagcttgacgacgtgtacgtgctaaacctaatgaatatacaactgcatctaaacgagcagctaataattgcatgaagttttcaccgtggacaccatgttggttaccagcgatttcaaatgtgttacggaattgtctttcagtcattccatataagtaacgtaatttttgtttttcacgtaattgtaatgcatattctgataattttttacgttggttaggaccgtgttgacctggtgcataaggacgtttttctaattccttaccagtaccacttaatgagatacctaaacgacgtgattttttccagtttgaacctctaaatcgagccataataagactcctcctttttctcttttgtttgttatgaaaaaacaaaaaagagtgttgcatgcttacttggatatattgttttatgtgtcctcgcctcatagcaacggttacacggcacgtccgcgttgggaacaacatagagccaactaatacgcaactgctaatttcgtttattcacacaaagtacattgtaacatgttatcggttgctgtcaatagtcttttcgactttgtccatattcaagttgcgatggaattatgatatttgcttttcaatacgagcaacaatttgttctaggccatttttgtctacatcagtaaatctacttgtaataggcgcatcgatatctaatacaccaataatttggttatttttacgaagtggaacaacaatttcagatttgctattcgcatcacaagcaatgtgacctggaaatgcattcacatcatctacaagttgtgtttgttcttcagaaacagcagtaccgcatacacctttgccgattgcgatatgaacacatgcaggatgaccttggaatggtcctaaaattaatgcttcgttttcaataagataaaatccaacccagttaatttgatcaatcgaatcatttagtagcgcggatacattactcagtatagcaattaaattcgactcatcttctattaaactactcacttgtttttccaataaattatagtttgtttctttaacttccgtcattagacaacctcactttttacttttcatttagtataaagactgttttaatagtaatcaatcaattgatttgaaaagggttagataataaataacctaatacatattattattagagatcattttaaataaaataaaaaatattcacatgaattaatccattttctcttttaatgcataggtaacttacgttataataaacagtgataaaataggaggagaaaacatatggtgttgtatatcgttttagcaattatattcattatactcattattgttggtgtattgttctatatgcgttcaaataaaagccaaatgatagaaaaggctgaagaacgaaagcataaagttgaacaattaccatacgatgaaagtttatctcaattaacagaatttaacttaacaggtgagacaaaatcaacgtatgatagattgaaacaatcatcgttagatagtaaaaatcagtatttattaccggtagaagaaaagattcatgatgcagagggcttgcttgataaatttaagttttcacaagctcaaactgaagtggatgaagcgcatgaaatgatggatcaatatgaagcgaactataatgagctcactacacaagtagaagagattataggactacataaacaaagtgaccatttatataatgaatgtaaaacggattaccgcgaaatgaagcgtgatgtgttagcaaacagacatcaattcggcgaagcagcttcaccgcttgaacaagaaatcgaatcttttgttccagaaatggaaacttatgaaacgcttaaatcagaaggtaatttcaatcaagcacatgaccatatcaaaactttaaatgatgacatgaattatttaaaaacagatatggatgaaattccagatttaataaaagaagcacaaaaagaattgcccggccaattccaagacattaaatatggttgtagagacttgaaagtagaaggctacgacttagatcatgtcaaaattgatagcacgcttcaaacattaaaaacggagttaagctttgtagagccaatgataagcagattagaacttgatgaagcaaatgaaaaattaaacagcattaatgaccgattagatgaaatgtacgaactaatcgagcttgaagttaaagctaaaaatgatgttgaagaaacaaaagaagttattacagataatttatttagagcaaaagaaatgaactatacattacaaactgaaattgaatatgtgcgcgaaaattattatataaatgaaagtgacgtacaaaatgtaagacagtttgaaaatgaaattcaaaatatgatttcagtatatgatgaaattttacgtgaaatggcgaaatctgcagtgcgttatagtgaagtgcaagacaacttgaaatatatcgaagaacatgtagctgttattaatgaaaaacaagaaaaattacaaaatcatttaattcaattgcgtgaagatgaggcagaagctgaagaaaatattttacgagtacaaagtaaaaaagaagaagtatatagaaaattacttgcttctaatttaccaagtgtaccggaacgttttatcattatgaaaaatgaaattgattatgaagtaagagaagttaacaagaaatttagtgtacgtccaattcatgtcaaacagttaaaagataaagtatctaaagtcgtcctacaaatgaataaatttgatgatgaagctacagatgtacttgttaatgcagtttatgcagaaaaactaattgaatatggcaatcgttatcgtaaagatagttcaaatattgataaaagtcttaatgaagcagaacgcttatttaagaataataggtataaacgttcaattgaaatttctgaacaagcattggaacgcgttgagcctggtattacaaaacaaatagaatcaaaagttattggttaatattaaacacattacgcataactatagattagaaaagactcgagacactgattgtctcgagtcttttttgcaatcgttgattcgaatgaggattgttaatttaaaaaaacggacagtcgatacatagcgttttatttgtaatgcatgttcatcgatttgaatacgtgaagtgtgcattgaatgtgaattgatttttatttaatcccatgatgaacaagctagtatcgtaaattatttaacaattatatgatttatgtctcagtctcttttctttttagtaaaagcgagtataatgctaacagtgtaagttttaatcggatagttaaaacatatgaaaatgtatttaagtgcgtatattcaatctaatttagttataaaatgtattaatgttaaatcattaaaatgaataggtggagcgcatgcatatattctgttaaatgaaatgtttatatgtagcatattccgattaagatataaaattttaaaagccgacgcttttcggagttcaaataaactacaagaaaaaattggagtgaaaacattgatataccttgataacgctgcaacaacgaagcctaatcaagatgtgttagatacttttattaaagtgaatcaatcactatattttaatcctaatagtccacatcaagcaggtttacaagcagaacaattattacaacaatcaaaacgacaaattaaagacttatttaatttagataatacatttgatattatttatacaagtggtgctactgaatcaaataatatagcacttaaaggtattgcttataagaaaaagaatttcgccaatgaaattatcacttcattattagaacatccctccgttttagaagtggttcgttcactagaggacgaaggatttattgtgaagtatgtcgatgtaacagatgaaggtcgaatagatttgaatcaccttcaaacattaatgtcagataatgtaggacttgttacatgtatgcatgtcaacaatataatgggtcaaatacaaccgattgccgatatagcagagattgttcatcaatatcctaaagcacatttacatgttgatgcagtacaagctattgggaaaacaccactcatatttgaaggtgtagatacacttagtctaagcggacataaatttaatggtttgaaaggccaaggcattttatttgttcgaaatatacatcagttagaaccaattgttcatggtggtggacaagaatttggtgtgagaagtgggacggttaacttaccgatggatattgctatcgttaaagcgatgaaatcagcagttaatcatacacaggatttaaatagtcggttaagcgaatttaataatgaattacgccaatatttggttgcatttcgtggtgttgaggttaattcacctaagggtgctgctgctcatattttaaatgttgggttggcaggtgttaaaggtgaagtattggtgaatgcattctctaaaaatgacatcatgttatcaacgacgagtgcttgttcttcgaaaaaagcaagtcttaatgaagttttgttagcaatgggtattccaacgaagcaaattgaaggtagtatccgtatttctatggatagctatactactgaagcagatattgaaacattcaaggaaaaattcaaattagtatatgaagaagtgaaggagttgttagtatgatttatgatcacatattagtgaggtacggtgagcttactttaaaaggcgccaaccgtaaaatatttgtgaacaaattacgttctaatgtaaagcttgcattaatgccgttacaaggttatacagtaaaggcaaatagagacagaatgtatattgaattagacgaaggcgcagatattgaagaaatgtgtaatcgactaaaaaaagtcttcggtatttattctatcagtcccgtattaaaaattgaaaagacagtagaagcggttaatgaattagcggtgcgctttgctaaggaatatgcagatggtgatacatttaaaattgatgtaaaacgttcagataaaaactttccatatgatacgtatgcattgcaacgcacggtcggtggcgctgttttagatgctacgaaccatttatcagtcgatgtgcataacccagatcacaacattaaagtagaagtacgtttagatgcaatctatatgtacgatcaagtgattgaaggttcaggtggattaccagtaggtacgggtggtaagacattgcttatgctatccggcggtattgattcacctgttgcaggtatagaagttatgcgcagaggtgttacagtagaagcgattcattttcatagtccgccatttacaagtgaaaaagcgaaagaaaaggttattgaattaacacgcattttatctggacatgtaggacccataaaattgcatattgttccttttacagatttacaaaaacaagttaataaagttgtacatgaacgctatacaatgacttcaacaagacgcatgatgatgcgcgttgcggataaagttgttcatgatattgatgcccatgcgatagtaaatggtgaaaatttaggtcaagtggcaagtcaaacgctaaaaagtatgtatgctattaaccatgtcacttctacaccagtacttcgcccgttattaacgttagataaagaagatattgtaaaaaaagcgaaagaaattggaacgtttgatgtgtctattcaaccttatgaagattgttgcacaatcttcacgccaaaaaatcctataactgaaccagatattgaaaaagtagaaaaatatgaaattggttatgattttgaaccattagtacaacaagctgtagatggtattgaaacattgcttattactagtgattaccaaagtgaaaaagatacagcaacacaagcactagctgacgatttattttaatatattaaagtatcatggaatatatattttttaataaataaaggggttggttaaatgttagagtgggatgtttcaattgtaatcatcattattcttcttggatttttggctgcatttattgatgcagttgtaggcggtggtggtttaatatcaatacctgcattgcttgcagttggtatgccaccatccacagcattaggaacaaataaattagcaagtgcattcggttctttgacaagtgcatttcgctttttgcgttctggcaatgtagatttgaaaattgttggtaaattatttccatttgtatttgtattcgctattggtggcgccagtatcgccacattcttaccttcagagctcttaaaaccagttgttattgttatactaaccattgtgatgatttacacgattatgaaaaaagattggggtaacgtccgtacctttaccaaattaacttttgggaaagcaatactatttgctttactcatgtgtttaataggcttttatgatggctttttaggtggcggaacgggttcttttatgctctttattttactaatgtttggttttgattttttaggcgcggcaggtaatgcgaaagtgttaaactttgcctccaatttaggtgcactcctcttatttatatgcttaggccaagtggattatttttatggcttgattatggctgtaagtatgatatgtggttcttatgtaggtgctatgtttgctataaaaaaaggtgtgggctacgtcaaagtattatttatagtcgtgactgcaatattaatcttgaaaaatgcttatgattatttaatacaaatcatatagctatcaattagtacagtatataaaatctgttataaatacataagtctcatttttgtagtagttttgagtcaaacacgtgattggattttaacagaaagtgtttatcaataagtaacagtatggtctaaagtaaatgatgaattgttgagagcatagtaagaaatcaaaatggattgatttcttactatgctctctttattaatcttatttaaggtatacatttaggatttaattgtgtttaaatgaagaaggaatcaatagaaaatatatgggagtgacgatgaatgtcgaaaaagcgtattatcgccttaatacttgcagttgtgatcgttctaggtggtataataatgagttctatttcagctgttgtttcatctttatttagtgaatcaactacatctgatacgaatccttttacagagaaagtagaaaaagaaggtaattccagcaaacgtatcgctcatctaacattaaatggtgaaattactgaaggtactggtggtggcctgttcggtggtgaaggatataaccatgaagcatttttaaaacagttggataatgtgaaaaaagatgattctataaaaggtgtgctgttaacggtcaatacacccggtggcggtacatatccaagtgatgaaatttatgaaaagataaaagaaattaaacaaaaacataaaaagatttatgtacatatggatagcatggctgcgtcaggtggatattatatttcagcacctgcagataagatttatgcaggtccacaaacaatgactggttcaatcggagtgattatgtctagtatcgattactccggattacaaaagaatttaggtatcaaacaaaacgtaatcaaatcaggtgaacataaagatattttaagcagttcaagagaaatgacaagcgaagaaagagatatcttacaatctgttttagatgatagcttcaatagatttgttaatattgtaaaagacggtcgagatatgccagaaagtaaagttagaaagctggcagatggtcgaatttatagcgcgcaacaagcgaaaagtaatggtctgattgacgaaattggttacgaagatcaaactgtcaaagcattgaaaaaagatattaatgctaaggacgcagaagtgtttgaatatagcacagacggtggttggttctcatcaatgtataatgtgaaatcaagcatttctcagtttacaaatgaaatcaaagatgtgaaatcaatcattacaaatgatactaaaactgaacctatgtatctttacgagggttaggtgaaattatggaaaacatacaagacagtgtttcagaatatacaaaagatagtgcacaaaaaatagatacagatgcactgtatcatgaacaaatgttaaaagctttatatgctggttttggtattaggttttgtgctttcataatagatttgttaatcattttcggagtacatagtttgatcttaaaaccgatttatcatttcacaaatttagattcagcaaaactatggattgattattttagtgtgggtcatctgttggatgcattagtattttatttgtattttgtattaatgacaaaatattttaaacaaacacttggtaaaatgatttgcaatatcagagtagagcgcatggacagacaacagctaacgtggacagatgtactgtttagagaatggattggacgtattattagcggtgtatttgcaaacttgccttatttagtgacaatttttactaaaaagcatagaggtatacatgattatttcgcagatacggtggtcataaaaaataaatttgaaaaattgttttatttaaagtaggttaacacttattacaggtagaatagtatcattcataattctaaagcgttataataattgaagtacacatttataatttaggaggcgttctaatggcgcaaattacattcaaacaagaaccaattactttattaggttcgcaagtgaaaacaggtgaaacagctccagaattcactttgctagataatgatttaaatgaagtaaacttatcaacttatgatggtcaaaagaaattaattagtgttgtaccatctatagatacaggtgtttgcgatcaacaaacgcgtaaatttaacgaagaagcttcacaagaagatggcgttgtattaactgtttcagttgatttaccattcgcacaaaaaagatggtgtgcatcgaacggattagataacgtgattacattaagtgaccataaagacttatcttttggtaaaaactatggtgtcgtaatggaagaattacgtttacttgcacgttccgtttttgtattagataaaaataataaagtcgtatattcagagattgtttctgaaggtacagatttcccagactttgaatcagcattagaagcatatcgcaatatttaattacgttttgcaatatatataataagttaaatatattgttgctcaagcaaacagtatcattgacattataaaaattactgtccataattatttggtaaaataagttagtataaactggcttgatttcaattaaattatgggcagtttttttagaaaggactattaaatgacacaagaagaaacagtaatggagcagttattcaaaacattagatgaaaaagtaaaggatttaaatgatggaaacggacaaagttttatcgaaaatttaggtcttgctatggagcatatttatacaaataagagagagttattagaacaagctacattgcaagatagaaggaaagcattccagtttgcatatctaagtctaatgcaaaaagaagatatacaagcaaatcatcaaattacaccagattctattggcctaattttaggctttttagctgaacgattcttaaaaaataacgagtcaatgcacattgcagatattgctagtggtgctggacatttaagtgcttcggtacacgaggtgctttcagatcacactttaatgcatcacttagtagaagtagatccagtactttctagagtaagtgtccatttggctaactttttagaaataccgtttgatgtttatcctcaagatgcaattatgcctttacctttcgaagacgcagacgttgtaataggggatttaccaattggatactatcctgttgatgatagaagtaaagaaatggcacttggtttcgatgaagggcacagttattctcatttcttattgatagagcaagctattacagctatgaaagcatctggttatgcatttttagttgttccaagcaatatttttgaaggtgaaaatgtgaaacagttgcaaaatttcattgctacagagacagaaatgcaagcattcttaaatttaccatcaaccttatttaaaaatgaaaaagcacgtaaatctatccttgtattacagaaaaaagaaacgaatgtgacgaaaccagtcgaagttttattagcaaatataccagatttcaagagcccacaacagttccaagcatttttacaagatttaaatgcatggatgcaagaaaatcatcctgaaaattaaactgtaatattcttgaattcatactgtattaatgattaaatagtaatggatataaaacttatttgaaaatggaggcattgtgcttatgtcaaaattgattttggctataaatgctggtagttcatctttgaaatttcaacttattgaaatgccggaagaaaaaattgtaactaagggacttattgaacgtattggattaaaagattcagtattcactattgaagtaaatggggataaaattaaagaaacaaatgatattgctgatcacgaagaagcagttaatatcatgttagatagtttcaaaaaacatggtgtcattgatagtatttatgacattaatggtactggacaccgagttgtacatggtggcgaattattcccagagtcagtttatataactgatgaagtagaaaagcaaattgaaagtttaagtgaattagcacctttacacaacccagctaacttaatgggtatccgcgctttccgtaaattattaccggaaattccacatgtcgcagtgtttgatacatcattccatcaaacaatgcctgaaaaatcgttcttgtatagtttaccttatcaatattataaagattatggtattcgtaaatatggtttccacggtacgagccataaatatgtctctcaacgtgcagcagatattttaggtaaaccaattgaagaattacgtcttatttcttgtcatattggtaatggtgcctctatagctgctatcgatggtggagaatctgtagatacatccatgggattcacacctttagctggtgtgacaatgggaacacgttcaggtaacattgaccctgcattaattccgtttatcatggaaaaaacaggtaagaatgctgaagaagtcttaaatacgttgaataaggaatcaggattacttggtatctctggtacatctagtgatttaagagatattcaaggagaagctgaagagggcaaagatagagctcaattagcactcgatgtcttcgcttcacgtattcacaaatatatcggttcttatgcgacacgtatgcatggtgtagatgttatcgtatttacagcaggcgttggtgaaaattctgatgttgtaagagctaaagtgttagaaggattagaatttatgggagtatattgggatgctaagaaaaatgaaagcattcatggtgaagaagcatttattaactacccacactcaccagttaaagttatcgttattccaacaaatgaagaagttatgattgcgcgtgacgttatcaattttggtgatcttaaataaattatatttaaataagtaaaggcattttccaaaatcggaaaatgccttttttgttattttggaataacttcaaacgccataaattgttgcttttgagccttattaaaattattgtcagcaactataacaatgctgtcgtgtccatttggtaattgtttaccaaatgtaataccttcgatattatctatgtgaccaatatcttctttatttaaatcagcgatgagttctttttttacagggtgaatcttagtttgctttaatgactcttgatttttaatatctgtagcttggtcggtatttattttataaatgcgtacataattgtgatatgaattatcagaagattgcacacttgcgcgttccaaagttaaaaattcatgattgttaattgctaataattcagaaacgccattttcagcttccttacccttaccaggtgatttcggtatagcatctaaacgatatgcatattcgtttaataagcgtccttgtctatcatattgtgtgatgcgagataatccctctgttgtaggtgtaggggatttaccatcttgtattaaaggcgcttctgttgctgtccaaatagaatgcccatctgctgaaaatgtacttccttctaatgcgagattattacggaaaccatgttttgcatgttgatccattttttgtgtgtggcttataggtatttctgtaataaagtcgccctgtaacgaagctaaatggataaaaggatttaggcctaaactacgatcaccttcacttgtatacatgatttgtttgtataaagggtcgaagcgaatagattatggatcagcaacgatatcttgtggattgtctttgtaatggttcttgttagtatagtttgaaccattcggctgttttagaaagtgcatagattgtagcttaattttattaaaatgattttggttatagtttagttttgcttcgtagaatctagaaggattttgttctgaacgatcagcacttattaataaccaacgatgagttgttggttgataggtaattccagaaatagcgccaacttttgtatcatcgaattgagtgttatatggcacagtttgactacctataaatctaaggtcgtctacggattgtgttgcgtgttcggatactttagcctttgcactaacttgactattatatgtgtgactcaaagtagttaatgctaataaacttattgcgaatgatttataaatcattttcatatttacatgctccttaatttaaaagtattaaattaagtataaaggataggtgtgaaatgaaattaaaatttcaatgactatattgtaaagtagtgagtgaaatgaagatttttgaaatttaaaatgaggagagggggggctttacagctactgtttaattgaaaaaagcctgagacatctattaatgtctcaagctcttttcgtaattatcttgttcaatcagccctataaattaaaaactatttagtgagcttgatattgagatctaaactcatcagtggcaacttgaggttggaaatcttcaggaagttcttctgtacgaaccactaacacatcacatggagaatggcgaacaattgcttcagatactgaaccaacgataaatctttcgacagcatttaaccctgaagtaccgcacataattaagtcagcatctacatctgttgctagctttttaggtataatagcttttggtgaaccaaattctaaacgtgtttcaacgtttttcacaccagcatttgtagcaacttctttataaccttttaataaatcgtctgagaaattttttgacttctcagtaaattgagcatcatacacttcatatgaagaatatgttcttgaatcaatgacattcaccactgttaattttgcatcattacgttttgccacatccactgctttgttaaaggcccattcagcttcatgtgatccatcgacggctattaaaatacttttataagttagcatcgtaattacctccttatttttcttacttatattataccaccgtttacagaatattaacataatttaaatgttgtaaaagtactctaaactttgattgcgctttcataaaatacgcgttactataaatttggaggtggatgaaatgattataggtattccgaaagagattaaaaacaatgaaaatagagtgagtttgtcaccaagtggtgtacatgcattggtagaacaaggtcatactgtcattgttgaaaaatctgcaggcttaggttcgtattttgaagatgtagactatactgaagctggtgcaagcatcgttaatgaacaagctgaagtatggaacgtagatatggttatgaaagtgaaagaaccattagaagaagagtttcaatatttcaaagaaggtctaattctatttacttatttacatctagcgaatgaagaaaaattaactcgagctttactagaaaataaagtagttggtattgcttacgaaacggtccaattgcctgatcgtacattaccattattaacaccaatgagtgaggttgcaggtcgtatgtctgcacaaattggtgctgaatttttacaaaaatataaaggtggcatgggcattttacttggtggtgtacctggcgtatcaaaaggtcgcgtatctatcattggcggtggtcaagctggaacaaatgctgctaaaattgcacttggtttaggtgctgatgttacaattttagatgttaatcctaaacgtttacaagaattagaagatttgtttgatggacgtgtccacacaatcatgtctaaccctttaaatatagaacaatgtgtgaaagatagcgatttagttattggtgctgtattaattccaggcgctaaggcaccaaatcttgtaactgaagatatggtcaaagaaatgagagatggagccgttatcgttgatattgcaattgaccaaggtggtatttttgaaacaacggatcgaatttccacacatgatgacccaacatataaaaaacatggcgtcgtacactatgctgttgcgaatatgcctggtgcagtgccacgcacatctacaattgctctaaataatgcaacgttaccatatgcccaacaactagcaagtaaaggctatttaaaggctttacaagataaccatgcattgtcattaggacttaatacaattaatggcgagttgacgaacaaaggcgtagcggaagcattgaacctatcttatacagatatcgaaagtgcacttaaataatataagtaatgaattattaaataaaaaactggcaagtcttggagtatttaactcaaaaagacttgccagttttttattttgctatgtcaaaatgataatgtcattaagaaaatatgggaagtatttaaacgattttagtaccgtggacttcttggaacggaaaggcttcaagaagttcaggaagattgtctttattcagaccgccgccaggcacgatttcgatgtgaccgcctgaatttactacaagtttacctaattgatttaagttatcgaacagatttgtatcgctcggtccgccatgtgttaataaacgtgtaaaccctatatcaattaattggtgtaaagccttaatttgtccttctaggtaaatttcatcaaatgccatatgacatacaactggagtaggtgaggacaaatttttcaaggtcttcatttgccattcgtttaaagttgagtcctcagttaaacaaccaaagacaaaataatctacatttaattgtttcaatgattttatgtcacgttgcatgatttcgaaatcatacaagttataaacaaaatgaccaccacgtggacgaatcataacagcaatctcaacgtggttagctttgcatatttctgttgcaatttctaccatgccgaaactaggtgtagtaccacccacacttaaattatcgcaaagttcaattcgattagcaccattggcaacagcttgctcaacttgctgaattgtttctactacggcctcttttatcatttttcgtaaccagttaaactttcattaccattttcagtaactaagatgtcatcctcaattcttacaccagctacacctggtacataaataccgggttcaacagttataaccatgcctgctttaaattcatttgtatttgtacttgaaacgtcttgatattcatgttcttctaagcctaagccatgtcctaggcgatgaggaaagtattcgccataacccgcttcagtaatgatgttacgtgcaatatcatctacatctttaagcgttacaccaggtttaatagctgctatagcttctttttctgcttttaatacaacatcgtaaatttcttgtgctttagcatcaggtgtaccaaatttaaccgttctagtcatatcactgcagtaattttcataaataacccctaaatcaaataagacaaactcgtcttttttcaattggcggtctcctggtgtgccatgaggggaagcagcatggtctccaaataataccatagtgtcgaaactcatttcatttacaccatatgctttaatttcatattcaatatgattgacaacttgacgttcagtgacaccttcttttaagaaactcacaccaatttcgatacatttatcggcaagttcacaagcttttttaattttttcgatttctgagtcacttttaatattacgtaatgttttgattgtttgatcaatatccccaaagctttgtacaccaaaagcatcaataagttcacgttgacgttgtaatgttaaatgtgctgattcaacaagtaatttattgaatttaatatcgtatttatctaaagcattttctgtgtctaaataaccgataacttcaccattaaatggagaggcgcgaacttcttcaacttctaattgcgggcaaaacaatacttgttcaccatttgatttaattagtaatgcaagtaaacgttcatgaggatcacttaaataaccagtgaaataaaaaatatttaaaggtgttgttatccaagcagcatctgcctgttgggattttaattcttcggtaatctgttctaatttcattttaattcatcctcctaaatagttaatcatatttaattttatgttacttgatgaaggaattcaaaagttaaatatgataataaaacaatatcataggaaaatttttaaatttaagaagaaaaacactcagtaaattaaattaccgtgttatagcgtgagggatttgtggtatataaagactaaacatatttacgggaggaattaattaatgaaactttcatttcatggtcaatcaacaatttattttgaagcaaatggtaaaaaggttattgtagatccgtttattacaggcaatggacaatctgatttagatgcatctacacttaaagttgattatattatattaacacatggtcacggagatcattttggagatacaatagaattagctaatagaaatcatgctactgtgattggtttcagcagaattaggtgattatctcactacttatcataatgtggaaaatgttagaccaatgaatattggagggaaagcagaatttgattttggtaatgtgaaatttgtacaagcattccatagttcaagtttaactgatgaaaatggtgtcccagtatacctaggtatgccaatgggtcttattttagaaattgaaggtaagacgatttatcacactggtgacacaggattattcagcgatatgaaattaattgcagatcgtcatccagtggatgtatgctttattccgattggtgacaatttcactatgggaatcgacgatgcaagctatgcaattaattcgtttattaaaccgaaaatttcagttccaatacactacgatacttttgaacttattgaacaagatccaaataagtttaaagaagcagtatctgtaggggaagtacaaatattagaaccgggtgaagacgtttcattctaatccctttataaactgtgtatttaaatatataataaaacgcctgaagcactttaaagtccttcaggcgttttattattttacgattaatactgggatgtgagctcttttagcaactttatgactgacactacctaagacaaattttttcttatcttcagcctttcggttactgaggacaacaatttcatattttccactattagcctctttaaccaattgttctttcgcattcccgcgcacaataatctcatcgtatttaataccatactcgtctaagctattgcgtgtactttctaaaccttcactacgtttttgtacgagcttatctaaatgaacaccagatttgatggatgcttgtgcatcttgctcgctaattgcatttaatattgtaactgtagtaccttcacctgaaagtttagaaacctcttcaagtgctttctcatttttaagtgttgtatcaacaccaagtaaaatatttttgaacattgttcatccctccttatcttcattttaataaaattttattcataaagccaattaaatttgtctatttaacatattaatttactaaaaagaaaattttatattatttaatggaacaaaaactgtgattttaggaatcgtaagataatttgttttgttacatcgcaattttagttataaaaagttataatgtcatagaaactgtcaaaaaaaacgaggttattgaaatgacaaagcatgaacaaattttagcatatatagaatctctagcagttggacaaaagatatctgttagaaagattgcaaaagatttaagtgtatctgaaggaacggcatacagggctattaaggatgccgggcaaattggattggtagctacaatagatagagtaggcacagtacgaatagaaaagaaatcacgtgaacagattgaacaactaacttttgcagaaattgtgaaaattatagatggtcaagtcttaggtggtagaaatggtctgataaaaacacttacaaaatttgcgattggtgcaatggaaattgaagatgtcgtaaaatatgttagtccacatacattattaatagtgggaaatcgtaaggatgtccaactagcagcgcttaaaagaggaagtgcggtattaattactggaggatttaatacatcagaagaaatcattcaatatgctgatgagcatgaattaccaattctatcttccaattatgatacatatttagttgccaatattataaacagggcgatgtataaccaaatgattcgtaaagaaattttggttgtagaagatatcgttaaaaccgtgactgaagacatggttgtatttgataatatgagtcttagtgattataaaacgaaagcccgtgagacaggccattcaagatttcctgtcatagatgaaaattggagattagtaggtattgtaacaagtaaagagattattaaaatggaaaaccaagacacacttgcacaatttatgacaaaatcacctatcaatgttcaattgtcaacgactgtggcaaactgtgcgcatatgatgatttgggaaggcattgaattgttaccggtgactactccgagtaaaaagctcataggggtaatcactagaaaagatgtgttaacagcgatgcaattgttaagtagacaaccacaagttggtgaaaccataaatgatcaaattgcaaaacatattacaatttcaaatgatgggatacatgtacaaatcacgccattattaactaatcaatatggaacattaagtaaatcagtatttgtagcaattattgaagaaacagtacgttatgaaatgagaaaattaaagaaattagaagttatgatagaaatcttaaatattatgtatattaaaacagtgcaaatagaatccgaaatacatgtacaatatgatatgttagatgtaggacgcaatttttcaaaactagaagtaacaatgacaagtgacggccatcgcgtagcaaaagcaatgattatttgtcaaatgatagactaataaatatataatgaaaaaggaagataaagatgacaacagaatttaatgaaatcatgaaagaaattaatgactcagaaacaattattatacatcgacatgtaagaccagaccctgatgcatatggctcacaattagggttaaagaactatttgaaactcaaattcccggataaaaagatatttgcagttggcgaaacagaaccgtcattagattttattggtacttttgatgaaatctcggatgatacttacaatgaagcgttagttatcgtttgtgacacagctaattcaccacgtattagtgatgaaagatttaatcaaggacgattattggttaaaattgatcatcatccagcagttgatcaatatggcgatattaattttgtaaacgatcaagcttcttcaacaagtgaaattatttttgatttcatcagtcattttaatgatattcccatcattgatgcatctgtggcgagggtactttatcttggcattgtgggagatacaggaagattcctatttaataacactacatcacatacaatgggtgttgcgggtcaattattgacatttccttttaatcataatgaagaacttaataaaatgggtgaaaaggatccaaaattgttaccattccaaggttatgtgcttcaacattttgatttaaatgaaaaaggtttctgtaaagttaccattactaaagaaattttagaacaatttgacattgctgcgaaccaagcttcattatttgtaaatgcaattgctgatatacaagggttgaagatttgggtgtttgctgttgatgagggcacagaaattagatgtcgcattcgttctaaaggtattgttatcaacgacattgcaagtgattttggtggcggcggtcatccaaatgcttcaggtgtatcggtaagagattgggctcaatttgaaacgctcgctgaagcattaaataataaactgtaataagatgggaggtatttgcaaatggttgcgcatttaaacattcatacgacatatgatttattaaattcaagtattagaattaaggatgttgttgcgaaggctgcacaagaaggctatacagcgctcgcaattactgatacgaatgttttgtatggacttccgcaattctatgacgcatgtatttctgcaaatattcatccaatctttggtatgacaattaatcttacagatggtttgtcagagcttgaaacaatcgtattggcgcaaaataacttaggattaaaagatttatttaaactatcatcggcaattaaaatgaaagagaaagtagaaacaccgatagaatggttaaaaaaatatgaaagtcatttcgttattatttttaaaaatgtaactgaatctcatgaagcaattatttcaaacttttcggaacatgcgcacgtctttgtaaatcataagagtaaagtcacttttgacttaccaatagtttgggcacaaagcacgcgttatttaaattcccaagattcagatacgctttctgccatggccgcaataaaggagaatagtaaattagatttagtgagtgaacaaacggattacaatgaacatctatattcaaatgttgaattacaaggtttgtcaatcgatgatgcggtttgggaacaaacaaatcaactcgaaacactttgtcaggcggaaatgatttatcatcaatctttgttaccaaaatataaaacaccaaatcaacagcaatcggatgcttttttatggcaattactagcagataatcttcagcaattaaatttaccactaaacaaaaaggaactttatcaaacacgtttagagcatgaatatcaaattatcactaaaatgggttttgaagactactttttaatcgtaagtgatttaattcagtacgctaagaacaatgatgtattagtcggtccaggacgtggatcagctgcaggttcacttgtaagttatttattaaatataacaacaatcgatcctattgaatataatctgttatttgaacgttttttaaaccctgaacgtgtaacaatgccagatatagatattgattttgaagatacacatagagataaagtcatccaatatgttcaagagaaatacggtgaaacccatgtcgctggtattgtgacttttggtcatttgcttgcaagggcagtggctagggatgtggggagaattatggggttcgaagaaatcacactaaatgaaatttctaaattaattccacataaacttggcataacattagacgacgcatattcacaggagccatttaaacagtttgttcatcgtaatcataggcatgaacgatggtttgatatttgtaagaaattagaagggttacctagacatacttcgactcatgcagcaggtattattattaatgatcatccattatatgaatatgcaccattaacgctcggtgatacaggtctattgactcaatggacaatgactgagtcagaaagaataggtttattaaaaatagactttttaggtttgcgtaatctctcaatcattcatcaaatagtaaaacaagtgaaacatgatttgaatatagatgtggatatagaacaaattccattcgatgacgaaaacgtatttcacttgttgtcacaaggggatacaacaggtatcttccaattagaatctgatggtattagaaatgtattaaaaaaattacaacctgaacactttgaagatatagtcgctgtcacatcactttatagaccagggccaatggaagaaattccgacctatatatcaagacgacatcatccagagaaggtgcaatatttacatccagatttagaacctatattaaaaacgacctatggcgttattatttatcaggaacaaataatgcaaattgcgagtaaatttgccaattttagttatggtgaagcggatatcttaagacgtgcaatgagtaaaaagaacagagcggtattagaaagtgaaagacaacatttcgtgaatggcgctttgaaaaatgggtatgacgagaatttaagtaaacagatttttgatttgattttaaaatttgcggattatggttttgctcgtgcgcatgccgtgagttattcaaaaattgcatacattatgagttatttaaaggtacattatgctaattatttttatgccaatattttaagtaatgctattggaagcgaaaagaaaacagcgcaaatgattgatgaggctaaacatcaaaaaattaatatattaccacctaatattaattacagtcattggttctacaaggccacaaaaaaaggtatctacctatctattggtgcaattaaaggtgtaggttatcaaagtgttaaattaattgtagaagaaagaaaagcaaatggtttctataaagacttttttgatttcacgcgacggatacctaaacgaattaaaactagaaaattacttgaatctcttatcttagtgggggcatttgatacttttggcaagaatagagcgacgctgttaaatgctatagatcaagtgctggatgatatctctgatattgaacaagatggttttatttttgatgtactcacacctaaagcttcttatgaagaaaaagaagagctaccagatcatgtgttaagtgaatatgagaaagaatatttagggttttatgtatctacacatccagtagaaaaagcatttgaacaaaagcaatatttgggtatttataagcttgctaacgcacaagataataaacccatttttgttcaagtagatcaatttaagcgtattagaacgaaaaatgggcaaaatatggcatttgtaactttaaatgatggtatcaataatttggatggtgtcgtattcccggatacctttaaaaaatatgaaatcgatttaaatacttctaaaatgttagtcgtaagaggtaagtttgagaatagaaataataaacaacaactgatattaaatcaagtggataccatggatcattttgagcaaactaaatttgacgaagcgcaacaagttgttgttcgaaaatgggatagtgaatctaaattggatcaattattaaccaacgataaagggcaaaatcaaattccggttaactattttgatgaaagccaaaacaatatagaaacaattggtttcataacacgagataatgaaatattaagtaaattaatccaacgtttatcaccccgagatattagaattatttaactttaaccgcactataaactatggtatagttaactgatggtaaagcataaacttgccatcagttttaatttttataaaaattaagagtgaaaaaatatataatagtttatatatctatatgtttttattacaaacattaacgtgcgaatgaaaataacaatttgttaacgatatcatttgtaatttgggttagattgtaataaaaatgtatatgaatgttattttaaactaattggatgtaaggggtagattacatgacattaagagacgaagcattagaaatgcatagaaaaaatcaagggaaattagaggtttcacctaaagtaaaggtgactaataaagaagaattgagcttggcatactcgccaggtgtagctgaaccttgtaaagaaatacatgaggaccctcgtaaagtatttgaatatacaatgaaaagcaataccgtcgctgttgttactgatggtactgcggtattaggacttggaaacataggggctgaggcaagtataccggttatggaaggtaaagcagtgttgtttaaaagtttttccggtatagatggtgtgccaattgcactgaatacgacggataccgaagaaatcattaatactgtaaaattacttgaacccaattatggtggtattaatcttgaagatatttcagcacctcgttgctttgaaattgaagaaagattaaaaaaggaaactaaaattcctgtgtttcatgatgatcaacatggtactgccattgtaacagttgcaggtatgatcaatgcattgagaatcgtagataaagacttatcggacattaaagtcgtattgaatggcgctggtgccgctggtattgcgattattaaattactttattcttatggtgtaagaaatatgattatgtgtgattcaaaaggcgcaatttatgagggacgttcgtttggtatgaatgacacgaaagcttatgtagctaaatggacgaatagagacaaaatagatggcagtttgaatgatgtgattgaagatgccgatgtatttattggggtttctgtggcagatttattgtctaaagaaatggttgaatcaatggctgacgatccaattatttttgcaatggctaatccaaatcctgaaataaaaccggatgtagcgaaagctgcaggtgctaaagtcatcggtacaggacgttcagattttccaaaccaaattaataatgtcttagcattcccaggcatatttagaggggcattagacgttgaagcaacacatatcaatgaagaaatgaagcaagtagctgttgaggctattgctgatttaatcaaacctgaagagttaaatccggactattgtattccagatccgtttgataaacgtgttgcaccatctgttgctcgagaagtagctaaagcagcgatggaatctggtgtggcaagagtagatgtagatccagaagagatatataataaaacaatgaaattaacagacttagataaataatattcattaacgctgattacaaaaccgaattggtagtgagtaactaagcgatggttaagtggaggtttaccaatgtttaaagattttttcaatagaagcagtaaaaagaaaaagtatgtaacagtatctgattcaaaacaaagtgatgtaccagcaggtattatgactaaatgtcctaagtgtaaaaaaattatgtatacaaaagaactagcagaaaatttgaatgtttgctttaattgtgatcatcatattgcgttaactgcacacaatcgtatagaagctatatcagatgaagggacatttacggaatttgataaaggaatgacctctgctaatccattggacttcccaagctatgaagaaaaaattcaaaaagaccaacaaaaaactggtttgaatgaagctgtagtgactggcacagcacaattagatggtatgacatttggtgtggcagttatggatgcgcgatttagaatgggaagcatgggctctgtattaggtgaaaaaatttgtagaatcattgaacactgtactgaaaatagattgccattcatattgttttcagcaagtggtggtgcaagaatgcaggaaggtattatctctttaatgcaaatgggtaaaacaagtgtgtctttaaaaagacatgcagatgctggattattatatatctcgtatataacaaatcctacaactggaggcgtttctgctagttttgcttcggttggtgatatcaacataagtgaaccaaaagcattaattggttttgcaggtagacgtgtcattgaacaaactataaatgaaaaattaccagatgatttccaaactgcagagtttttattagaacacggacaattagataaagtcgtacatagaaaagaaatgaaagcgacattatctaatattctaaaaatgcaccaagaggtgaaaacaaatgcttgattttgaaaagccgctttttgaaataaaaaataaaattgaatctttgaaagaatctcaagaaaaaaatgatgtagatttacaagaagaaattgacatgttggaagcttcattagcaagagaaaccgaaaaagtatatacaaatctgaaaccatgggatcgtgtgcaattagcgcgtttacaagaaagaccaacatctttagactatatcccgcatatatttgattcattcatcgaattacatggggatagaaattatagagatgatccagctatgattggcggtatcggctatcttaatggacaagccgttacagtagtgggtcaacaacgtggtaaagatacaaaagataatatatatcgcaattttggaatggcgcatccagaaggttatagaaaagcacttagattaatgaaacaagctgaaaaattcaatagaccgattttttcatttattgatacaaaaggtgcatatccgggtaaagcggcagaagaacgaggtcaaagtgaatcaatagccagaaacttagttgaaatggcttcgctaactgtaccagtcatctctattgttattggcgaaggaggaagtggtggtgcacttggtttaggcattaccaatcgcatcctaatgttagaaaacagtacatattctgttatttctccagaaggtgcatccgctttactttggaaagatagtaatctagctaaaatcgcggcagaaacaatgaagattactgccgaagatttatatgaattaaatatagcggatgaagttatcaaagaacctttaggtggcgcacatcatgatgtcgaaacacaagcacaaagtatcaaacgcacatttgaatcgcatttatcagaattgaaccaattaacgcaagaagaattagttgaagatagatatcaaaaatttagaacaataggttcgtatacagaataaagtgtctgatgtttttgatattcgtgttaaatatgttgaaagctaagataataatttctattgtcttagcttttttgttatttttacaaaatgaggcaattgctatagatttatgatttgtttacgataattcgaattaaggtaaatagtacataagtattcaagtaattttaggaacttataaggaaacgcttactatatgtacaattatcgaatacttatatttaaaacgtttacatttgtcacgaagccctattttaatggaaacagcttagattttatggtatttttagagtacgaaatacatgttagaaaggtatgtcgtcatgaaaaaaattgcagtgttgacaagtggtggagattctccaggcatgaatgcagcggtaagagctgtggttagaaaagcgatttacaataatattgaagtctatggtgtttatcaaggctatcaaggattattaaacgatgatatcgagaaacttgaactcggttcagtaggtgacacaattcaacgaggtggaacatttttatattctgcaagatgtccagaatttaaagaagtagaagtccgtaaaaaaggtatagaaaatctacgtaagagaggcattgaggggcttgtagttattggtggagatggtagctacagaggtgcacagcgtataagtgaagaatgtcctgaaatacagacgattggaataccaggtacgattgataatgatatcaatggttcggactttacaattggatttgatacggcattaaatactataattgaatgtgtagataaaattcgtgatacagcatctagtcatgcaagaactttcatcattgaagttatgggacgcgattgtggtgatttagcgctttgggctggtttgtccgttggtgctgaaactattattgttccagaggttgagacagacatcaaagatatagcagaaaagattgataatggaatcaaacgtggcaaaaaacactcaatcgtgatggtcgcagaaggttgcatgtcaggtgaagtatgtgcagaagaattgactaaatatatcaatgttgatgcacgtgtgtcagtgctaggccacattcaacgtggtggtagcccaagtggtgcagatagagtgcttgcatcacgattaggcggacatgcagttgatttactgttagatggaaaatctgctattggtgttggaattcgtaataatgaattaactgatacaccttttgacgagatatttagatcacatgaacatgagtttgattttgaaacttatgcgctaacgaatgaattatctatttaaaatactgggaggaaataataatgagaaaaactaaaattgtttgtactattggacctgcgtccgaatctgaagaaatgcttgaaaaactaattaaggctggaatgaatgtcgcgcgcttaaacttctcgcatggtgaccatgctgaacataaagctagaattgacacaattcgtaaagtttctaaaagattaggcaaaacagttgcaatcttacttgatacaaaaggaccagaaatacgtacacacaacatgaaagatgggcttattgaacttgaaaaaggttctgaagttaccgtaagcatgactgaagttgaaggtactcctgaaaaattctcagtaacgtatgaaaacttaatcaatgatgttgaagaaggttcatatattttattagatgatggtttaattgaattacaagttaaatcaatcgataaagcaaacggtgaagtattatgtgatgtacttaatactggagaattaaaaaacaaaaaaggcgtaaacttacctggtgtcaaagtaagcttacctggtattacagataaagatgctgacgacattaactttggaattagtgaaggcgttgatttcattgcagcgagctttgtacgtcgtccaagtgatgtattagatattcgtaaattattagaagcgaagcaaaataaaaatatcagcattatacctaagattgaaaatcaagagggtattgataatattaaagaaatattagaagtttctgatggtttaatggttgctcgtggtgatatgggtgttgaaattccacctgaatcagtaccaatggtgcaaaaagatttaattagacaatgtaataaattaggtaaaccagttataactgctacacaaatgttagactctatgcaacgtaatccacgtgcgacacgtgcagaagcaagtgacgtagcgaacgcaatttatgatggtacagatgcggttatgctttctggtgaaacagctgcaggtcaataccctgaagaagcagttaaaacaatgcgtaatatagctgtatcagcagaagcagcacaagattataaaaaattattatctgaccgtacaaaattagttgaaacttcattagtcaatgctattggtgtttcagttgctcatactgctttaaacttaaatgtcaaagcaatcgtagctgctactgaaagtggttcaactgcccgtacaatttctaaatatcgtccacaatctgacattattgcagttacacctaatgtagaaactgcgcgtcaatgtgctttagtatggggtattttcccagtcgttaaagaaggacgtaaaacaactgatgcattattaaataatgcagtagcaacagccgttgaaactgaaagagttcaaaatggtgacctaattattattactgctggtgtaccaactggtgaaaaaggtacaacgaatatgatgaaattacatttagttggtgatgaactagctaaaggacaaggtatcggtagaagttctgtagtaggtaaaacactagtagttaaagatgctagtgaactagaaggcaaagacttatcagaatctataattgtaacaagttctgtagatgagacgcttgtaccatatattgaaaatgcaatcggactcattactgaagaaaatggcattacatctccaagtgcaattataggattagaaaaaggtattcctaccgtagtaggcgttgagaacgctacatctgaaattcaaagtgatgtactcattacagtagatgcaaaccaaggaaaaatctttgaaggttatgcaaacgtactttaaaaatataatttaattcataatataatatgtagaaagcctcgacgtcatgtcgaggctttctttttgataacaaactactatgaatatagtttgaatctattactcatttaaacatcaacgacagatcaatatgtgcaataaaaataaagagtctgagacatttatttttgtcccagactcttattcatttagtcattctaacctaagacaggttacgaatgctatattagaaaattggatttctgtccaactctcttaaaatatttttaataaagtttaaatttgctcagtcataatcggtttttattgttgtgattttgatacttgtttatagcgcatatacattaaacctaaaataataaaccaaatcggtgtaagaaatactgcaattcttgtatccgtatttacgaatagtaagctaaacactaatataaagaatactaatatagcatatcccatgtatttaccacctggtaatttaaatgacgcatttttgtgtaattctggatttttacggtgatagtttatataagccactgtaattaacgcccaaactacaatgaatagtaccgtagaaacagtggtaatatatgtgaatacaagtgttgcgttcggtataatatagttcaataaagcagcaatcattagtaatccacatgaaacgaatatcgctatatgtggcacaccgtttttatttgttttattgaaaaacggtggcgcttgtttttgtgacgataatccaaagagcattcggctgtttgaaaaaataccactattacaagatgatgcggctgctgttaatactacaaagtttataataccggctgcgaatggtatgccaattagtgcgaagagccttacaaaaggactttcgtctgaattgatttgattccatggaataattgacatgatgactgctaaagcaccaacataaaatattaatatacgtgtcggtacactgttaactgcttttggtaatgttttagtgggatctttagtttcgcccgcggttacaccaataagttcaattcctacaaatgagaatagtgccatttggaatgacataacaaaaccactgatacctttagggaaaataccattattgtacaagttagttaaagatgcttgtccaaactgagtattgtaagccatgataatcataatagcgcccactacgattaaagcaatgattgtaacaatttttattatagaaaaccaaaattctaattctccaaataatttagcacttaatagattaagtgacattaagacaagtacgcaaaatagggcactcatccagtttggtatgtttggaaaccaaaagctaacatactttgcaactgcggttacttcggccataccagtaatgatccaacataaccagtatgtccagccagtaacaaagccagcaaatggacctatgtaatggttggtaacatctgcaaaggatttaaaattagtattagtaattaatatttctcccaagccacgcataaacataaataacataaaaccaattatgatatacgtaagtaaaatagacgggccagttaatgcaattgtttgaccagcacctaagaataatccagttccgattgcacccccgattgcaatgagctgaatgtgacgattacttagttctctttgtaactgttgttttgccatatataagactcctttatttagttatttattattatgctatgcaatataaaataaaacaactattttctgaaacgatatcatacagaacacagtataatagtacattaataatttgttattaatcatgataaccaattgaaaaggtataaaaattgaagtgtacgtgcttacatattaaaatatatctataacaacgtatatagatagatgcgtgtttatgggcatatagacaaaaacatatttcttattgaattggtaaggaaattaaaacctaaatattcacaaaagttctaaaattggatataatggtttatgaaagccatttcataacgaaatagaaaaggggaattatatatggcagagttacaaaaaggtttagaaggggtaattgcagctgaaacgaaagtgagttccatcatcgacagccaattaacttatgctgggtatgatattgatgacttagcacaaaatgctgaatttgaagaagttatctatttactttggcattatcgattacctaatgaagaagaattgaaagaacttaaagaaaagctctttgaatatatgacattaaatcctagagtgtatagtcattttaaagaatacgctacaggtaacgtacatccaatgacagcattaagaacgtctgtttcatatatcgctcattttgatgaacatgctgaagacgaagatgaaagcagaacaatggaaagagctattcgtattcaagctaaaatagcttcgcttgttacatcatatgcgcgtgttagagaaggcaaagaagctgtaaaaccaaataaagatttaaactatgcaggtaactttttatatatgttaagaggagaattacctagtgatatcgaaattgaagcttttaataaagcacttgtattacacgcggatcacgaactaaacgcatctacgtttacagcaagatgtgctgtttcatctttatctgatatgtattcaggtattgttgcagcagttggctcattaaaaggtccattacatggtggggcaaatgaacgtgtaatgagcatgttatctgaagtgaaatccattgatgaagttgatgattacattgataacaaaataaaaaataaagaaaaaattatgggctttggacaccgtgtatataaagatggcgatccaagagcaaaatacttaaaagaaatgagtagaaaaatcactgctgaaactgggcaaagtcaattgtttgatatctcagttaaaatcgcagataaaatgaaagccgaaaaaggtttaattgcaaatgtcgacttctttagtgcgactgtttatcacagtatgaacattaaacatgatttatttacaccaatttttgcagtaagcagaacttcaggttggattgcacatatcttagagcaatatagagataatagaattatgcgtccaagagcacaatatattggtgaaacaaacagaacatacgaaccgattgaagaaagataagtcagatagaggcatcactactcataaataagtgagttgctttatataaataagtattattttagttagcgcaattaaaatataattcaaatacacggaggtttttatacatggcaggcgaaaaagtagcaaaaacaaatgaaggtttaacagtaccaaataatccaatcattccatttattattggtgatggtattggaccagatatttggaaagcagcaagcagagtaatcgatgctgcagtagagcaagcttataatggtgaaaagaaaattgaatggaaagaagtattggcaggccaaaaagcctatgatgaaacaggtgaatggttaccacaagcaacgcttgatacaattgaagaatatttaattgctatcaaagggcctttaactacaccaattggtggcggtattcgttcacttaacgttgcgttacgacaagaattagatttattcacatgcttacgtccagtacgttggttccaaggtgttccatcaccagttaaacgtccagaagatacagacatggttatcttccgtgaaaacactgaagacatttatgctggtattgaatttaaagaaggcacaccagaagttaaaaaactaatcgactttttacaagatgaaatgggcgctaaaaatattagattccctgaaatatcaggtattggtgttaaaccagtatcaaaagaaggtacagagcgtttagttcgtgcagcgattcaatacgcggtagacaataaccgtaaatcattaacattagtccacaaaggtaatatcatgaaatttactgagggcgcatttaaacaatggggttatgatgtagcgcataacgaatttggtgacaaagtatttacatggcaacaatatgatgaaatcgttgaaaaagaaggtaaagacaaagcgaatgcggctcaagaacaagctgaaaaagatggtaaaattatagtgaaggattcaattgctgatatcttcctacaacaaatcttaacacgtccgtcagatcacgatgttgttgctactatgaatttaaatggtgactatgtatcagatgcattagcagcacaagttggtggtatcggtatagctccaggagcaaatataaattatgaaactggacatgctatttttgaagcaacacatggtactgcgcctaaatatgctgacttaaataaagtgaatccatcatcagaaattttaagtgccgtattaatgttagaacatttaggatggcaagaagctgcagataaaattactgcatctatcgaaaaaacaatcgcgtctaaagtagttacttatgactttgctcgtttaatggatggtgcgaaggaagtttctacatctgactttgctgatgaattaattaaaaatctataattcagttaaaattaaatctgtcagcatacatttagcatatattaaaaaagacgaaattctcacttatggaatttcgtctttttatatcaattggctactaaaactgtttgataactaagggagtctatgtgagatagggttggaataaaatacacagagtaaatgaaaacgcttatttaggtgttcatattatgtatatagtgttaagattctattaacgcaatatattgttttcaataatgacttcagttataaatagcgcaatacattgtttaaagcaaaattacaaaagtttcaaaaaatatttacatagattgttattacttgctttgtaaagtttatgttaaaaaattttaaactatgttatttttattaaaaattaagttataattaatttgtaaacaaaaatatggaggtatactatgtcacaaaaagtactagtagtagatgatgagcaatcaattgtaaccttattaaaatataatttagaacaagctggatacatagtagaagtagcctatgatggtgaagaggcattagaaaaagtaaatgctacaaacccagaattgattgtcttggatgtaatgcttcctaaaaaagatggaattgaagtttgtaaatcaatacgttctgataaaaatcttgtacctatacttatgctaactgccaaagatgatgagtttgatcgtgttctaggtctagagttaggcgcagatgattatatgactaaaccattttcaccaagagaagttgttgccagagtaaaggcaatattaagaaggtctgcaatcgtaaatgaggcggtaccagttgaaaatgatgaagatgacatactcattggttcgataagaattcgacctgaatattttgaagtatatagagaagatgaattgcttgaattaacaccaaaagaatttgaattattattgtatttaattgagcgtcaaggcagagttatcacacgtgagcatatgttgaactctgtttggaattatgaattcgctggtgattctagaattgtggatgtacatataagtcatttaagagataaattagaagaaaatccaaaacaacccaaactaattaagacagttcgtgggttaggctataaattggagagacctaaagtctaatgttaaagtttcatcaacgacttttatttttattatgtatcatcgttattataagttttttagctttaggtgcaattattacacatgcaatatataatacagtttcttcagctcaagaaggtgatttggaacatcaagctgatcatctagtcaaactatataagaatgacaaagaaaatgagatgactgatattgctaaaagtgaaaagcttacagttaaaatagaggaaagtaacgatgtcttgttttccacaaatcaaggaacacaaataaatgaggatataaaaaatgaagcaaatccttctcgattaatctatgataaagaaaatgatgatcgcagatatacatttaaaaccactattgatgataaagatgtataccttagtggaataaataatgagatattagaattacagattcaaatgtggaaatatattgcactgattggtttatttgtgattatcatcatatttttagttgttagaagtattaaccggacttatattagaccaattaatgaagtgacttatgcaacgaacctgttagcagaaggatattaccatgtgagagtacctgaaagtaatgtcaaagaaaccagagagttatttgtaacgacgaatgaacttgctcgcaggttgcaaagattgaatcacaaacaaaaacttcaatctaatcgattaaaaactacggtagaaaatataccaagttccatattgatgattgataaatatggtgaaatcgttgtagctaataaatcattttataatgtttttacacctgaaaaagctgtagagcataaaagttatgttgactttgtagatttgacactacaaaaacttattaccgaagcatttaaagtagaaaagccaatatatgatcaaattgaattaacaattgatcaagttcatcaaaaatattttgacacatcttgtgtaccgattctttctaaaacaaagaaaaatttatatggtatggtgattgtgttacacgatattacgaatcttaaaaaactagaaaatttgagaagagaatttgttgctaatgtgtcacatgaattaaaaacaccaattacgtctatcaaaggttttgcagaaacattattagatggtgcaaaaaacgatgaacagacgttaaatgaatttttaaaaattatttctaaagaatcagatcgcatagaaacattagtgtttgatttattagatctctcacatgttgagcaacaaacagaaattgtaacagaatacgtgagtctttcggaaatcgcagaaagcacaatcaagaatatgcaaaatattgcagaagaaaagcaaatcacaattgttaatgaaattaaacctgacatagtcattgatgcaaataaagataaagtatcacaagtggctttgaatttgttgtctaacgccgtgagttactctaaagcatcaagtgaagtgattgtacgtgtatataaagatgcaaacaaacgtatcatggaagtccaagattttggtattggtattagtgctgaggatcaacagcatatttttgaaaggttttatcgcgtagataaagcgagaagtagagattcaggcggtactggtttaggactttcaataaccaaacacattatggaagcacataatggacgtattaatgtctttagtcgccctaatgaaggctctacttttagagtcacatttttcgaataacgttgtgacacatgttataattttaaaatcaaagtagcttatatgtatataacggtcagataacctaaatggtatttgaccggcttttttatttcgttaatatttatttgaatatcgcaaatatgacgtatcaatacagttacgggagttttttatgctaaaataaatataaatatgtgttggaggttaaaacattgaataaattaatcttaattgatggtaacagtctgagctttagagctttttatgctttaccacttttacaaaataaggcaggtatacataccaatgctgtttatggctttgcgatgttacttgagaaaataattaaagaagaacagcctacacattttcttgttgcatttgatgcaggaaaaaccacatttagacatgaacaatatagtgaatataaaggtggacgtcaaaaaacaccaccggaactaagtgaacaatttccatatgtcagacaattgttagatgcgtatcaaattaaacgatacgaattagacaattatgaagctgacgatattataggaacattaagtaaacaggcaaatgcagaaaaatttgaaacaataattgttacaggtgatcgagatttgacgcagttagctacagatgatgtaacaatctattacacaaaaaaaggcgtaacagatgttgatcattatacgcctgaatttattgctgaaaaatatgatggcttagtcccaaatcaaatcattgatatgaaaggattgatgggcgatgcatcagataatattcctggcgtggctggggttggtgaaaaaacagcaatcaagttattgaagcaattttctactgttgaaaatgtttataatcatattgaagaagtgtctggtaaaaaattaaaagaaaaactagaaaatagtaaatctgatgctttaatgagtaaagaacttgctacaatcaactgcgatagccctatagaagtcactttagcagatacgaagttacctgaaagtcctgattcaacagcaaaaattgatatctttaaaaaacttgaatttaagcagcttttagatcaagtcgatgtagagggcacgcatacttctgctgaagaattagaacttgaaattacatcggattttagtaatgtagattttaatgaattatcagaagccactattcattttgaattagatggatcgaattatttgaaagatgatattttgaaatttgctttatatgatggatcaaatcatgttgtcattgatgcggataaggttcatgactatccggaattgatagcttggttagaaaatgataagacagaaaaaatcgtctatgatgctaaaaaatcatatattgttgcacatcgcttagacatagctattaaacatatcgtttttgatgttatgctcgcgagttatattatcgatccatctcgcacaattgatgatgtgaattctgtggtttcgtattttgatcaacattatgtgaaagaaaatatagaagtttttggtaaaggtaaaaaaagacatgtacctgaggatgatattttagatcatcacgttggaacgattatcgaagcaattaacaaaactaaaccaaaaatggaagcgcagttagaagaatataatcaaactaacttattagatgatttagaattaccgttagcacgtattttaagtgaaatggaagaaactggcatttacacagtagcaaccgatttgcaagaaatggaaaaagaaattcaagcgaaacttgatgtactaattaataatatttataacgcggctggcgaatcatttaatattaactcaccaaaacaattaggcgtggtactatttgaaacattagaattacctgttattaaaaaaactaaaacaggttattctacggccgtagatgtactggagcaactacaaggacaacatcctattatcgactatattttagagtacagaacattatcaaaactacaatctacttatgtagaaggactgcaaaaagtgattagtgaagataatcgcattcatacgcgttttaatcaaacacttgcacaaacgggtagattgtcatctgtagatcctaacttgcaaaatattccaattcgcttagaagaaggtcgaagaattagaaaggcatttaaatctagtgacgataacaatgtcatcttctcagctgactattcgcaaattgaattacgtgtacttgcacatattactcaagatgagagcatgaaacaagcattcatcaatgatgaagatattcatacagcaactgctatgaaagtatttaatgtacagccagatgaagttgatagtctaatgcgtagacaagcgaaagcagtaaatttcggtatcgtatatggcataagcgactatgggttaagtcaaagtttaggtattacacgtaaacaagcaaagcagtttattgatgattatctcgatagtttccctggtgtgaaacaatatatggaagatattgttaaagattgtaaagcgcaaggttatgttgagacactattacatcgccgtcgttatattccggacatcactagtagaaactttaatttacgtggttttgcggaaagaacggctatgaatacaccgatacaaggcagtgccgcagatattatcaaattggcaatggttaattttgtaaatgaagttaaacatactgattttcatgcgcaattattattacaagtacacgatgaattaatttttgaattacctaaagatgaagtagaggcttttagtgaatttatagaagaaataatggataatgcattggcattagacgtaccactcaaagttgaaacaagttatggtaagacatggtatgacgcaaaatagaaagtaggtgaacaagtgcctgaattacctgaagtagaacatgtaacaagaggcattaagccatttgtaaaagggcaaaaaatagaatctattctcttttctgataaagtacaagaaggaaaagcgaatcatagagaaaccattgttaaaggtatggagcttgatacttttaaacgattcactaggctttatacgattgttgatattgagcgaagaagtaagtatattgtcttctatttagaaaaagatggagataagcgaattctaataagtcatttaggtatggctggtggattttttgtcgtagataagcttgaagatattagtgtgccaaattatcgcaaacactggcatgtcatatttaaattagataatgacaaattacttgtgtattcagatattagacgctttggtgaaattagaaacgttgcttcatttgaagcttacccatcatttttagaaattgccccagaaccttttgaaaaagaagctatggcacattatttggcttggtttgataaaaagttatatcaaaataaaccaatcaaacaaatgattctagaccaccgtgtcatatcaggatgtggaaatatatatgcttgcgaggcattatttagatcaggtattcatccagctagattaccaaaagatttaaatcatcaggaacgagaaatgttattctattatgttcgagaagtactggaagcgggtataaaatatggtggaacaagcatttcagattaccgtcatgctgatggtagtacaggtacaatgcagcaacacctaaacgtatataaacaaaaagtttgtaaagtttgtggcgatgacattgcaacacaagtaattgcaacgagaaatagtcatttttgtccaacttgtcaacaataaaggaagagtgagaatatgccgaaagttataggactaactggtggtatcgcatcaggtaaatctacggtatcagaactattaagtgcacatggttttaaaatcgtagatgcagatattgcatcacgtcaagcagtagaaaaaggtacaaaaggcctagaacgtgtgaaagaagcctttggtgagcaagctattgatgaaaatggtgaaatgaatagagcttatgtaggcgaagtagtatttaatcaacctgaaaagagattagaattaaatgaaatcgtacatcctattgtgcgagaaattatggaaaaagaaaaagcacaatacttaagcgaaggttatcatgtcattatggatattccattattatttgagaataatttacaagatactgtcgatgaagtctggttagtatatacttcagaaagtatacaaatcgatagattgatggaacgaaataatatttcaatggaagaagcgaaagcacgtgtttatagtcaaatttctatagataaaaaacgtagaatggcagaccatgaaatagataatcgtgatacaaaattagaactaaaacaaaatttagaaaatttattattagaagaaggctatatagagagtcattctgaagatgtactttaataaaagtgattacaaccacccaattatctttgataattgggtggtttttatataagagacgttctaataacttaagtgtttttattattaatatttaaggaaatgcataagtgagaataggatatatacgaaaatcttactgattaatattagaaaacataaaagccttaatgctaaagtttttaaatttattatagaaaacgctttcctaaataaatatttatgttatactatttccataaagtataacactaagacgaggggtgcttcgaatgacgacaaatatagcaattaacggaatgggtagaataggtagaatggtgttgagaatcgcactaaaaaataaagatttaaatgtagtggcgataaatgcgagttacccaccggaaacaattgcacatctaataaattatgatacaacacatggcgtttatgattttaaagtagagccaatagaatcgggaattaaagttgatgatcacgaaattcaattagtttctgatagaaatcctgaaaatttaccatggaagcaattagatatagatgttgcaatagaagcaacaggtaaatttaaccacggagataaagcgatagcacatattaaagctggtgctaaaaaagtattgttaacaggtccatctaagggtggagatgtacaaatgattgtcaaaggcgttaataatgaccaattagatattgagaaatatgatatttttagcaacgcttcatgtactacaaactgtatcggtccggttgcaaaggtattaaatgatcaatttggtatccaaaatggcttgatgacaactgtacatgccattaccaatgaccaaaataatattgataatccacataaagatttaagacgtgcacgttcatgtaatgaaagtattattccaacttcaactggtgctgctaaagcattgaaagaagtattgccagaattagaagggaaattacatggaatggctttacgcgtacctacaaaaaatgtatcactcgttgatttagtggttgatttaaatgaaaatgtaacagcagcacaagtgaacgaagcttttgaagcgaatgatttacaaggtgtcatttctaccgaagatgcaccactcgtttcaatggactttaacacgaatccacattcggccattatcgatacacaaagtacaatggtaatgggagataataaagttaaagtgattgcatggtatgacaatgaatggggctattctaatagagtagttgatgttgccacacaaattggacaattacttaaaaacgatgttgcagctgtagcaaattaattttcaaaaatagcgattacaaattttaaaaataattatctaaaacgtttcgtaacatagttgttaatttataaactatattacgaggcgtttttaattttattattatttcttcgttaatattagctttaaagttaataaatcttaattatacggcgtttcttttgaattatgctatacgatatagatatagtgtaatagcgaatcttttgtgacttgcatatttatagtataatgtaaggtaatcaaaaagagagggtgataattcgatgaaatgcccgaaatgtaattcgactcattctcgtgttgtggactctagacatgcagatgaagttaatgcgattcgacgtagaagagaatgtgaagagtgtgaaacaaggttcactacttttgaacatatagaaaaaagaccactcatcgtagttaaaaaagacggtacacgtgagcaatttttacgagaaaaaatattaaatggtttagttcgttcatgtgagaaaagaccagtacgatatgagcaattagaagacattacaaataatgtcgaatggaaattacgtgatgagggtcgtgctgaaatttcatcaagagaaattggtgaacatgttatgaatttattgatgcatgtagatcaagtatcgtatgtaagatttgcatctgtatacaaggaatttaaggatgtagaccagttactacaatctatgcaaggtattttagctgaaaataaacggagtgattcttaatggggttacaatcctacgattatggtttgagaccacatgataatttcaatgttgttcgtgattttaatttaaataataaccatttagaaatattaaatagattgtttacgcccatgattggtatgaatgcgattggtttatatcattacttgaatcaatttgcggaagttggttctgatactgttttaactcactatattataatgagtgaattaaaaataaatttgttggaattcagaaaagaaatggatttgttagaaggtacaggccttgttaaatcatatgttaatcacagtgcacaacattcatcgtttatttatgatttgattcaaccaccttctgcgaaacaattttttaacgaccctatgttatctgtttatttatatagtgaggtaagtaaacaacgttatcaacaactcaaacggcatttcgagagtgatcagcgtattgattatagtcaatatcaagatgtgactcgtacgttcactgatgtatttaaagtgccaaataaaacggtggaaaatgatggtatagaaaaaaaagaaacagcatatactggtttaaacttaagtcaagttcagtttgattttgagacactttacgatttattacaaagccattttataagtgcaaaaataattgataaagatgctaaaatattaatcacacaaattgctacattatatggattgacacctgaagcaatgaaacgcatcatattaaaatccatcacaagtgcacaagaattgtcatttgaagaattgcgtaaacatgcaagaacgtattatttaatggagcatgaacaacaattgcctacactaaatgttaaaacagaagcggatagtgaaactaaactagagaatcaaccagtggaaactgaaagtgaaaatgatagttggcttaaacaattggaggaaacaagtcctattgatatgcttgcatcatggtcagagtctgaaccaactacccaacaaaaatatatgattgaagaactgattgaacgtgaacatttatcatttggcgttattaatattctattgcagtttgtaatgttaaaagaagatatgaagctgcctaaatcctatatatttgagattgcatctaattggaagaaaaaaggcattaaaacagcagaacaagcatatcaatacgccgtgaaagtaaatcagcctaagaaagaaaaccaatctaataaacgtaattataaacagaaacaattagcttccagagaaatgacaccaaaatggttagaagaacgcgataataagcaatcgaatgaaccatccaaagatgaagatgatgagaaattaaaaaaagatagagaacaatttcttaatcaattaaaaaatagatggaaggaggacaataaatgaaatctttcaaccatattatgggtgaatcaaatgatttatcaaaacgcatcgaaaaaatcaaaaaagatgtcgtcaaagatccagacgtcaaacaatttttagagacacataagtccgaattgaccaatgcaatgattgatgaagatttaaatattttgcaagaatataaagaccaagaaaagcattatgatggtcatgcttataaagattgtcccaattttgttaaaggacacatacctgaattgtacattgaaaataatcatataaagattcgctatttaccttgtccttgcaaaatcaaacatgatgaagaaaagtttaatgcacatttgattacatcccatcacatgcaacgcgacacactagatgctaagttggaagatatttatatggacagaagagatagattagatgttgctatggctgcaaaccaaatctgcgacaaaattacaaatcacgaatcgcaagtgaaaggtttatatctacacgggccatttggaacggggaaatcttttatattaggtgctatagcgaatcaattgaaaactgaaaaaatatcatcgaccatcgtttatttaccagagtttattcgttcgttaaaaggcggatttaaagacggtagttttgagtctaaacttcaaagagtcagagaagcgaatatactcatgttggatgatattggtgctgaagaaattacaccatgggcaagagacgaagtcattggcccgctcttacattatagaatggttcaagaactgccaactttcttcagttcaaatttaagtttcgaagaattagaatatcatctttcagttacgagagacggcactgaaaagacaaaagctgccagaattatggagcgaattaaaacactttctataccgtattatctagaaggaaaaaattaccggaatgattgaaatttgaaataaatgttgtataatataattaaatctaaatcttacgaaataatacggagacaagatgaataaatggatacctcacagagaaccaatgtttgttgagaattggtaggtatatttattgattactacttcgtcaatgatgttgtaataaacatccggctcaagaccgttatcttatgtagagtaaagttattatgcaatatttttgttgaataactttaatttagggtggtaccacgaagacctcgtcccttttttgggatgaggtctttttgtgttattgagtagtaacataaggtgattcgtaaagatttaagagcttgaaaaaaataggaggaatgtgacatggatcaaattaaaattaaatttccagacggtaatacaaaggaatttgacaaaggaacaacaactgaagatatcgcacaatccatcagcccaggattaagaaaaaaagctgtggcaggcaagttgaatggacaattaattgatttaactagacctattgaaagtgatggagatattgaaatcgtgacacctggttcagatgaagcgttggaagttttacgtcattctacagcacatttaatggcgcaagcattaaaacgtttgtatggtgaggttcattttggtgttggacctgttattgaaggtggtttctactatgactttgatatggaagaaagtatctcatcggatgattttgaaaaaattgaaaaaacaatgaaacaaattgcgaacgaaaattatccaattgagcgcaaagttgtgtcacgtaatgaagcaaaagcttttttctcagatgatccgtataaacaagaattaattgatgcgattccagaagatgaaaatgtgacattgtatacacaaggagaatttactgatttatgtcgtggggtccatgtaccatcaacttcaaaaattaaagaattcaaattgttatcaactgcgggtgcttattggcgtggcgatagcaataataaaatgttgcaacgtatctatggtacagctttctttgataaaaaagatttaaaagcccatttgcaaatgcttgaagaaagaaaagaacgtgaccatcgtaaaattggtaaagagttagaactcttttctaataatccgttagtaggcgcaggtttaccactatggttgcctaatggtgcaacaatccgtcgtgaaattgaacgttatatcgtagataaagaagtgagtatgggttacgatcacgtttatacaccagtaatggcaaacgttgatttatataaaacatctggacactgggatcattatcaagaagatatgttcccgacaatgaaattagatgaatatgaagaaatggtattaagaccgatgaactgtccacatcatatgatgatttatgctaataaaccgcattcatatcgtgaactaccaattagaattgctgaacttggtacaatgcaccgttatgaagcaagtggtgcggtttcaggattgcaacgtgttcgtggtatgactttaaatgatgcgcatatttttgttcgtccagatcaaatcaaagaagagtttaaacgcgtagttaatttaattatagatgtttataatgactttaattttgagaattatagcttccgtttaagttatagagatccagaagataaagagaaatactttgatgacgatgagatgtggattaaagctgaaagtatgttaaaagaagcggttgatgaactaggattagactatgaagaagccatcggtgaagcggcattctacggtcctaaactagatgtacaagttcaaacagcgatgggaaaagaagaaactttatctacagcgcaacttgatttcttattaccacaaaaatttgaattgacttatataggtaatgacggcgaacagcatagacccgtagttattcaccgtggtgttgtatcaactatggaacgtttcgtagcgttcttaacggaagaaactaaaggtgcctttccaacttggttagcaccaaaacaagtagaaattattccagttaatgttgacttacattatgattatgcaagacttattcaagatgaactaaaatctcaaggtgtacgtgtagagattgatgatcgtaatgaaaagatgggttataaaattagagaagcacaaatgcaaaaaatcccatatcaactagtcgttggtgacaaagaagttgaaaacaaagaagtaaatgttagaaaatatggttcccaagatcaagaaacgcttgaaaaagatgaattcatttggaacttagttgatgaaatcagattgaaaaaacaaagatagtcttgaaactattgttaaaatcatgtatattacagtttagtgagtaataaaaaaattaaatttgagttagaggttgcgtttttaaagagtaatgattcagaagccagatggggcatatgttgaatgcatgaaaggtgaaaatgccgaaacctgtattgaccatttacaatacaggttgggacagttatcgaaagaaactggactgtcacatatgtgatgtgctacctatataaatgctattattaaaatggttgcatatctaatgggtatgcaaccattttgttttggtttaatgattattgaaaatacattaacgggatagagcgaaaatatgaagtcatgtgtaatggatatactgaatacagatgacaatgttttactataaacgtattggattaatcatatagaaagttagcctctaaatttaaagaaagggagcttctatggcaaatcaagaaaatcaaaacactgggattaaaagagggttgaaagaccgtcatatttccatgattgctattgggggttgtattggaacaggactattcatgacttccggtggtgcgatccacgatgctggtgcacttggtgcgcttttagcatatgcaatcattggagcaatggtcttctttcttatgacttcattaggagagatggcgacgtatttacctgtatctggatcgtttagtacatatgctacacgctttgtagatccttcattaggatttgcattgggatggaactactggtttaactgggtaattactgttgctgccgatgttacaatagctgcgcaagttattcaatattggacgccgttatctggtattccggcttggagttggagttgtctctttttaattattatttttggacttaatgcattatctgtacgagtttatggcgaaagtgaatattggttcgcgttaattaaagtagttactgtaattattttcattgcaattggtctattaacgattctaggtattatgggaggcgaatttgtaggctttgatacatttactaaaggcggtggacctattttaggtgacggtcttggaggtagtttacttactattttaggtgtgttcttagtggcaggtttctcattccaaggtacagaattgattggtattactgctggtgaatctgaaaatccagaacgcgcagttccaaaagcaattaaacaagtattttggagaatattaatcttttatatacttgctatatttgtaatcggtatgctaataccttacgatagttcagcgttaatgggcggcggagatgatatttctacttcaccatttacattagtattccaaaatgcaggcttagcatttgctgcgtcattcatgaatgcagtcattttaacttcagtgctttctgcaggtaactcaggtatgtatgcttcaactagaatgctttattcaatgagtaaagataaactggcataccctatatttggtaaaacaaataaaagcggtgttccttatgtatctttaatcgttacagcaatcatagttataggcatatttatattgcaacacttgagtggtgatgcatatgaatatatcgtagctgcgagtggtatgactggtttcatcgcatgggtaggtatagctgtgagtcattatagatttagaaaagcatttgataaacaagattatgataagtctaaattgaaatataaagcgaaattattcccatttggacctatatttgctggtatcttgtgtgtattagttattattggacaagatgtagattttattaaaacaggtgactttgaccttaacaggtttgttatcacttatatgggaattccagtattcttggcgttcttcatttatcataaagtgagatataaaacgaaaatggttccattggaaaaagtgaacttacgacaagatgttgatatggaagaaattaataaataataaaaagctattgacttgtatatgtattattgataagataggtaacgttgaatacgaaacgaaccaagtagaagctcccgcttctcacctgttgcgacgctataggcagttggcaggtcttatatatacatgttaatttcatgtgtagagaagagcgggtatattatatactcgctctttttgcttgggataatttcgtaaaaatcttggaggtgtcaaccatagcaaaagatcaaactcaagttaacgaaaagattcgtgcaaaagaattacgcttaatcggtcaagacggagaacaaattggtgttaaaactaaaaatgaagctctagaaatggcggaacgcgttggtttagatgtagtcattatggctccaaacgctaaaccacctgttgctagaattatggattacggtaaatacaaatttgaacaacagaaaaaagaaaaagaaatgaaaaagaaacaaaaaacaatcaaccttaaagaaattcgtttaagtccaacaattgaggaacacgatttccaaacaaaattgaaaaatggacgtaagttcttagaaaaaggcgataaatgtaaagtttcaattcgtttcagaggtcgtgcaattacgcataaagaaattggtcaacgtgtattagaaaaatttgcagaacaatgcaaagacatcgctacagttgaacaaagacctaaaatggatggacgtcaaatgttcatcatgttaagtccaattaacgaaaaataataatcgatattacaggaggaaatgaatcatgcctaaaatgaaaacacaccgtggagcagctaaacgtgttaaaagaactggttcaggtaaattaaaacgttctagagctttcacatctcacttatttgcaaacaagagtactaaacaaaaacgtaaattacgtaaagcttcattagtaagcaaatcagatatgaaacgtgtaaaacaattattagcttataaaaaataattaacgatataaaaaagataagatcgaacatatttagaggaggaatttattatgccacgagttaaaggtggaacagtaacaagagcgcgtcgtaaaaagacgattaaattagctaaaggttacttcggttcaaaacgtacattatataaagtagcaaaacaacaagttatgaaatcaggtcaatatgcattccgtgaccgtcgtcaaagaaaacgtgatttccgtaaattatggattacacgtatcaatgcagcagctcgtcaacatgacatgagctattcaagattaatgaatggtttgaaaaaagctgaaattgatatcaaccgtaaaatgctttctgaaattgcaatttcagatgaaaaagcttttggtgaattagtagctaaagcaaaagatgctttaaaataataatcaagtagagtctgggacatgaattattgtctcagactctttgtcatataggacaaaagatggttgaaatgcaatctctatattggagatcatttatgtttatcgattcgtttcaatttaattctagaaaagttaaacaatgaaaattcaacttttctcttgttgtcttaaatttaatgaatgagattaaaatacatagcaaattaatttttgtaatttctaaagttatattaacaatctacaatatgattttgaataatcattttgataaataactacggtttgataaaataatgaagaagtcatatatgaaggagaaactaatgtctaaatttgatgaaatgataacagtagttccaagaacaattttatttgataatgaaaaaaataaatttaatggtttcttagataaaaatactacaaaaggtcaagatatttttgacacactttcaaaatatgagataaaacgacgcggtgatatggaagaagacccatcatacaaacaattaatttcatattgcatattagaaaatgaacatgatgaaattttagtttatgaacgtttgtctggtggtggagaggcacgtttacatggtcagtcgtcaatcggtgttggtggtcatatgaatgatgttaagggtgctgaatctataaatgaagtgttgagagttaacgctcaaagagaattagaagaagaagttggtttatctgatagcaaatctcagaatttagcttacatcggtttcatcaatgatgacacgaatgaagtaggcgaagtacatctaggtgtcgtctttaaaatcaatgtaaatagtaatgatgtagaatcaaaagaaaccgacacattgagaataaaatgggtagatcaaagtaaaattgataactatgatgaatttgaatcatggagcgctttaatattacaagctaaacagtaggggtgtataaagatgtccgatgtcattccttttcctcgatcaaaagaaaaactgattagagaaattaagcaatcgtttaatagcaatgatttagagcaaatgtatcaattgtttgaagactttgaagaacacttcgaattagatgaacaaatggctttattaaaatgttcaatgttatataatatgcagcattttctagaattacgtgaagaggccattattttacttaagcaaggaacgacaaagtatgatgatttaatggtttattatgtgaaaagtttaaacggcttgggacagtattttcaagtagtagaagtcatcaatcaaattatagatgaagttaatgaccatagaactagaatggaattgttcccgattaaagaatatgcaatgagtcaaatagatagccataatgaacatgctaccaaaatgcttcaagatttcgactcaatttcacttcgtgatcaaattaatacgatacttacattaattgattatagtcagttcagctataaaaatacggttgtgaatattattgagcatgttactctcacacctaatgtgttaagtatcatgcttgaatatttacgttttgcagaatatgatcaagagatagatataataaaatacaattttgacatgtctgttatacctagcaaattaccaggattagaacatactgaatttaaacttaacatcattccaaatgtgattcagcacattgaagaagatgctgcgcaattgatagaagaagcgcttcatttaatgaataatcatgccattttattttatccattggatatcgagcgaatcgctcatatagatgtttgggttgaggcatatacaaattactttaaagcgatgataggtttagaatcattagatgagtctaatgcggccattcaatttattactgaaatagataaattgaataattaatcatttgtatttcgggtaattgtaaaaaatagtgttataataaagcaaataatttcaatttcacaggaaaataaaatgttataagcacagggtttgtgtagtgaatagtcctatgctataatagtgaagttgaaaaaataaaataggataatcatggaggtttttatacatgacagcaacttgggaaaaaaaggaaggtaacgaaggtgtattaagcgttacagttccagcagaaaaagtagacaaagcaattgatcaagctttcaaaaaagtagttaaacaaatcaatgtacctggctttcgtaaagggaaagttccacgtccaatttttgaacaacgctttggtgtagaagctttatatcaagatgcagttgatatcttattaccagaagcttatggtgaagctattgacgaaactggaattaaaccagttgaccaaccagaaatcaatgtaacatcaattgaaaaaggtaaagaaatgacatttgaagctaatgttgttgtagaaccagaagttcaattaggtgactacaaaggtttagaagttgaaaaacaagatgttgaattaactgatgaagaattacaagaatcaattgatcatcaattaggtcatttagcagaaatggttgttaaagaagatggcgctattgaaaatggcgacacagttaacattgactttgatggctatgttgatggagaacaatttgaaggtggacaagctgaaggctacgatcttgaaattggttcaggttcatttattccaggattcgaagaacaattagtaggtgttaaaactggtgaagaaaaagatgttaacgttacattcccagaagaataccatgctgaagaattagctggtaaagaagctacattcaaaacaaaagttaatgaaattaaatataaagatgttccagaattaacagatgaaattgctaacgaattagattcagaagcaaacactgttgatgaatataaagaaaacttacgtaaacgtctaactgaacaaaaagaaacagatgctgaaaacaatcaaaaagaagaagcaattaacaaagcagcaaacaatgcttcaattgatgttccagatgcaatgattaatactgagttagatcgcatggttcaagaatttggacaacgtatgcaacaacaaggtcttaatttagaaacttatttccaaatttctggtcaagatgaatcacaattaagagaacaaatgaaagacgatgcagaagaacgtgttaaaacaaacttaacattaactgctatcgctgatgcagaagatattgaagtttcagatgatgatatcgataaagaattagaaaaaatgagtgaacaatttaatatttcagtagaagatattaaacaaacactaggtaatacggatatcgttaaaaatgatgtacgtattcaaaaagttatcgacttattagttgatgaagctaaattagtagaaccatctaaagatgactcagaagcgtaactaaatataaatagagcaaattgttttgtgaattatatgttagtcgtttaatatagtaaactagtagcagatgcattcaaataatgtgtctgctacactattttatgcaaataacttgtgaaaggtgtaagttgcatattaaaatactatctagtatagtctttagggaataggggtgtaaatagaatgttcaaattcaatgaagatgaagaaaatttaaaatgctctttctgtggtaaagatcaagaccaagttaaaaaactagtagcaggaagtggcgtgtatatttgtaatgagtgtatcgagctatgttcagaaatagttgaagaagaattagctcaatcagagcctgaagggctaactgaattaccaacacctaaagaaattatggacaaattaaatgattatgttattggacaagaaaaagctaaaaaatcattagctgttgctgtttataatcattataaacgtgttcaacaattaggacctaacgaagacgaagtggaattacaaaaaagtaatgttgctttaatcggtccaactggtagtggtaaaacacttctcgcacaaacattagctaaaacattaaatgtaccatttgcaattgctgatgctacaagtttaacagaagctggttatgtcggtgatgatgttgaaaatatattactacgtttaatccaagctgctgattttgatatagataaagctgaaaaaggtattatttatgtcgatgaaattgataaaattgccagaaaatcagaaaacacgtcgattacacgtgatgtatctggggaaggtgtccaacaagcattgcttaagattttagagggcacaacagcaagtgttccaccacaaggcggacgtaagcatccaaaccaagagttaattcaaattgatacgactaacatcttatttgtacttggtggtgcctttgatggtattgacgaagtaatcaaacgtagattaggtgaaaaagtaattggtttctctagtagcgaagcatctaagtatgatgaagatgcgattcttgaacaaattagaccagaagatttacaatcatatggtttaattccagaatttattggacgtgtgccaattgtagcgaaccttgagacattagatgtagacgcattaaaaaacatcttaacgcaaccgaaaaatgccttagttaaacaatatactaaaatgcttgaactagatgatgtcacattagaatttacagatgaagcattgtcagcaattagtaataaggcaatagaacgtaaaacaggtgcgcgtggattacgctcaattatcgaagaagcattaattgatattatgtacgatgtaccatcttctgatggcgttgttaaagtagtaattactgcagaaacgattaatgatgaaaatgaacctgaactttacgataaatatggaaatcttgtaaataaagaacaaacatctgcttaatatattttaagtagtaaactgggagtgggactaagcaatcaaagttaattgagattgctaacccactcctatttttatttttttcaaaataaccactttatagtgagaatacatattcatttaataatttgtgtaatataatgaatcagagagtttaacagaaaagagggacgaaaatgaaagttaatcctaacgagattgaattattgataagtgcggtgaaaccagaacaatatcctgaaacaggtctaagtgaagttggtttaagcggaagatctaatgtaggaaaatctacatttattaatagcatgattggtagaaaaaatatggcacgtacgtcacaacaacctgggaaaacacaaacacttaatttttataacatagataatcaacttgtatttgtcgatgtaccaggatacggatacgctaaagtgagcaaaaaacaacgtgaagcttttggcaaaatgattgaaaaatatatttcacagcgagaagaattaaaattagtcattcaacttgtagatttaagacataacccaacagaggatgacattttaatgtataactacttaaaatattatgaaattcctacatttgtagtagcaactaaagaagacaaaattgcaaaaggcaaagtacaaaaacacttagcaaatattcaacaaaaattagaaatggaacctgaagatgaaattataagttattcatctgtgaaaaataataaacaacaacaaatttggaatgttatagaaaagtatttgtaattattataaagaacaggctttttatcattacatataatagaaaattaagtataattatgacaacaatatgactacagattataattcttctaatttacaggacgagttacttaacgcatgtcataattgtgttataataaacttattgtaatatgtatggagggcgttataaatgcatttaattgcggtaagcattaatcatcgtactgcagatgtagcacttagagaaaaagttgctttcaaagatgatgccatacgttcagccaatgttgatttatatgaaacgaaatctattttagaaaacgttatactatcaacttgtaaccgaacagaagtatatgctgttgcagatcaaattcatacgggtcgctattatatacagagattcttagcgagatcatttggattagatgttgaggatattaaaaatatgactgaagtaaaagtgggggacgaagcagtaaaacatttattgcaagtcacttcaggtttagattctgttgtactaggtgagacacaaattctagggcaaattagaaacgcattctttttagctcaagaagaagatacaacaggcactatctttaatcatctatttaaacaagcaattacttttgcgaagaaagcacataatgagactgatattgctgataatgcagtaagtgtttcgtatgcggctgttgaactgagtaaaaaagtgtttggcaaagtcaataataagcaagctttaattataggtgcaggggatatgagtgaattatcactcttaaatttaattggttcaggtgtaactgatatcacaattgtaaatagaacattgagtaaagctcaagatttagcaatgaaacatcatgttaaatttgaaccaatggaatcattaccaagacttttagcagacgtagatatagtaataagttcaacaagttcagaaaattatattgtgacaaatgaaatgttgcaatctattagcactgaacgtaaacacgattcattagtaatgattgatattgcggttcctagggacattgaaccgaatatagatacaatccatgatatgtttagctatgatgttgatgatttgaaaggtttagtagatgctaatctgagagaacgccaactagcagcagaacaaattatacaaaacattccaaatgaaattgaagcacataatgaatgggttaatatgttaggtgttgtgccagttattcgcgcacttagagaaaaggccatgtcaattcaagaggatacaatggatagtatagacagaaaattacctggattatctgaaagagaacgcaaaatcatttcaaaacatacaaaaagcattataaaccaaatgttgaaagatcctataaaacaagctaaagaattgagtagtgataagaaaagtaacgaaaaattagagctatttcaaagcatatttgatattgaagctgaaaatgcatatgaagctaaaaagcaaaagaacaatatgaaaacaggtcaaatcttaagttttgaataagcattagcaaatggtgataatatgcaagaactattattcataaggttaaatgaactaatattattaatttatctatttagtattgcttgttatttttttgattttattaaaaggttttataagattagaaacattggatttgttacattggggattgtttgggtgttacaaacaatctccttatctttttatgtaaccgcaacaaatcaagtgccattgggcaatgtttttgatgtattatttgcacttgcgtggttgattatttcgatatcaatcgtgattagtgtgattaaacaagtcaatatatccattttcttatttaatataattggcttcgtttttatcgcaattagtacatttcaacctatgcactatcaaggtgctggtgaaaaattgaatgtaatcaatgaattacttattgtacacgtaacgtttgcgataataagttatgctgtttttgcctttgcatttgtgaatagcattttatacttaattcaatttaaaaatttgaaacaaaagcgatttactcaaaaatactttagaattagtagtgtagctacacttgaaaaagttgtattttataatagtttagtgggttttttatttatcatattaagcattattttaggtgctcaatggggcatcaatacgattgggatggatatttttgtagatccgaaagtaattatgtctgtaattattacgatattgtatggtttatacttattattaagagtaaggcagtcgatatcaaaacataagttgatttatattaatatcattctattttgtttaaacatgattaatttattattcacttcccatgtttctgattttcatcaatggactgggatttaaagagatactaaatataaatgataaaacgctaaattgctaggaggttacgcaaaatgcgtaagttagtcgttggttcaagaagaagtaaattggctttaacacaaagtcgacaatttatagataaattaaaagctattgacccaagtttagaaatagaaattaaagaaatagtgacaaagggtgacctcatcgtagataaacaattatcgaaagtaggcggaaaaggcctttttgtgaaagaaattcaaaatgaattatttaatcatggcatcgatatggcgatacattctttgaaagatgtacctagcgtcattcctgatgggttaactttagggtgtatccctgaccgtgaaaatccatacgatgcatatattgcaaaaaatcatgttcctttaaatgaacttcctgataatagcattgtgggaacaagttcgttacgcagaggtgcacaaattcttgcaaaatatcctaagttacaaattaaatggatacgaggaaatattgatactcgtttaaataaacttgaaacagaagattatgatgcaatcattctagctgctgccggattaaaacgtatgggttggtctgatgatatcgtcacgagctatttagacaaagaaacattaattccagcaataggtcaaggtgcattaggcattgaatgtcgttcagatgatgagacccttttatcactattgagcaaagttcataatcaagatgttgctgattgtgtcactgctgaacgtacgttcttaactcgaatgaatggtagttgtcaggtgccaatcggtggctatgcaacaaaagaagctgatggcacaatcgaatttacagggttaatcatgtctccagatggtaaagaacgatatcagcacactgtacgcggcacagatcctgttgcattaggtgaagaagtgactaaagtattaaatgaacaaggcgcgtatgaaataattaaagcactaaacgaagaacaataatacttcgaggtgaaaataaatgagaccagttatagtaatgactcaaacgagtgaattttataaatcagatgtatgtatactacataaacctttcataaatgtagaaccattatcatttaatctgaatttactcgatgttaattatgactggcttattttttcgtccaaaaaagctgtggaatacttcaaaccctacttatctaaactgaattacaaaaaaattgctgtgattggtgaaaaaactgcagattattgtacttcaattggattgaaagtatcattttgtcctaaagactattcgcaagaaggatttctgaaagcatttaaaacacatgaacaaagcaatattttattaccttctagtgcagctgctaggtccacgcttgaagaaggattgaaacaacaaaattataatgttcaaaagattgatttatatgagcctgtgccacatacaaagcatattaagcatgttaaaatgttgattgagcaaggcaaagtggatgcaattacattcgcaagttcatccgcagtgcgttatttttttgaagataatcaaaacgtatcatttaataattattttgtgatagggcaacaaacgctagatacattgaatcattatcaaaaacaaggtatcgttgctgatatacagacattagatgctttagttaataaaattttagaaagttgggaagaaaatgcaatttgatagacatagacgtttacgtagtagtaaatcaatgagaaatttagttagagaaacacatgtgaacaaagaagatttaatttatccaatctttgtagtagaacgtgataatgttaaagaagaaattaaatcattgcctggcgtttaccaattaagcttaaatgtattagacgaagaaattaaagaagcatatgatttaggcattagaggtgttatgtttttcggtgttccaaatgaaaaagatgctataggaacaggtgcatatgatcataatgggattgttcaagaagctacaagaaaagcaaaggctatgtatgatgacttattagttgttgcagatacatgcttatgtgaatatacagaccacggtcattgtggtgtcattaatgaacaaacgaaagatgtagataacgataaatcactaccattattagtgaaaacagctatatcacaagttgaagctggtgcggatatcattgcacctagtaatatgatggacggctttgttgctgaaatcagagcaggtctagatgacgctggatattataatgtcccaattatgagttacggaattaaatatgcatcaagtttctttggtcctttccgtgatgctgcagaatcaacaccacagtttggagatcgtaagacttatcaaatggatccagctaatcgtagagaagcattgagagaactagatagtgatttacgtgagggcgcagatatgatgattgttaaaccagcccttagcttcttagatattattagagatgttagaaatactacgaacgttccagttgttgcatataatgtaagtggtgagtacagtatgactaaagccgcatcattgaatggttggatagacgaaaaagcagttgttatggaacaaatgacttccatgaaacgtgctggtgcggatatgattattacgtatttttcaaaagatatttgtcgttatttagacgaacaatagtgattaggaggttatgtgaatgcgttacagtaactcagaaaaagcaatggctaaagccgaagaattaatgcctggtggtgtaaacagtccagtaagagcatttaaatctgttgatacaccagccatatttatggatcatggtgaaggttcaagaatttatgatattgatggtaatgaatacatcgattatgtattaagttggggtcctttaattttaggacacaaaaataaacaagtcattgaaaagatacatgaagcggtggacaaaggaacaagttttggtgcttcaacattacaggagaataaattagctgaacttgttatcgaacgtgtaccatctatagaaaaagtgcgtatggtatcttcaggtactgaggcgacgttagatacattacgcttggctcgtggttatacaggtagaaataaaattgtgaaatttgtaggttgttaccatggtcatagtgactcacttttaataaaagctggttctggtgtagcaacacttggattacctgattcaccgggtgtgccagaaggtattgcaaaaaacacaattacagtaccttataatgatttagatgcaatcaaagttgcgtttgaagaattcggtgacgatatcgcaggcgtaattgttgagcctgtagctggtaacatgggtgtggtacctccagttgaaggttttttacaaggcttaagagatatcacaacagcgtatggttcgttattgattttcgatgaggtaatgactggattccgtgtaggatataactgtgcacaaggatacttcgatgtcactcctgatttaacttgcttaggtaaagtaatcggtggtggattgccagtaggtgcattcggaggtaaaaaagaaattatggatcaaattgccccaacaggtgatatttatcaagctggtacattatccggtaatccattagccatgacgagcggctacgaaacattaagtcaattaacacctgaaacgtatgactatttcaataaattaggtgatttactagagcaaggcttaaaagatgtttttgccaaacataatgtgccaatcactgtaaatcgtgctggttctatgataggatatttcttaaatgcagggccagtaacgaattttgaacaagctaacaatagcgatttagaaatgtttagccaaatgtatagagaaatggcaaaagagggcgtatttttaccaccttcacaatttgaaggaacgttcctttctacttcacatactgaagaagatattaacaaaaccatacaagcatttgatacagcattaagtcgaattgtataaagtttaaatgatgcccgagcaaccaatgtgttgagcgggcattttatttggatggactgtgattgacgataatgatgaaagttgtgagaacatgaataagcaattaagaaataatatgatcgtattactgttcgccgtgatattaagtttgatattaaacgcagcgcatatattgttgccattcatgtttggtcctattattgcaagtgtgatttgtgtgagggtctttcgtctagagattgaatggccattttggcttagtcagataggtttggttttgctaggtgttcaaattggttcaactttcactaaaaatgtaatattagatattaaagatgattggttaacgattattttgattactgtcatgttgttagccctagcattagtgatagcattctttttcaaaaaaattgccaaagttaatacggaaactgctattcttagtgtgattccaggggctttaagtcaaatgttaatcatggcggaagaaaataaaagagcaaatattatggtagtcagtttgacacaaacttcaaggattatttttgtagttattctagtaccatttatttcttactttttcagagataatggtagtaatggtagccttgaaaaggcgacaacgaaggtactgacagatgcagtatcaattccccaaatattacttttagcattagcagtttttattgtttatatcataatgagtaagattaattttccaacgaaacagttactagcaccgattatagtacttattagttggaatttaattacaggtgtaacatttactctagataattatattattgcgtcggcccaggtgatctatatgattcgcattggtctacaaatagctaagttgctagatcaaatgaaagggagaattgcagttgcgattgcatttcaaaatgtacttttgatattacttgcctttatcatggtgttgctaatttcgatggtgtctaatcattctgtaaatgaattgttccttggtgctgcacctggtggcatgagccaaatcgtattagtagcaattgaaacaggtgccgatgtggcgctgatatcgagttatcatatttttaggatattctttattttattcttaattgcacctttattaggtcatttactcaaatatatagatagatcacattcttagagctattagaatttattgatttactattgagtttgattaggtattttaaaatgaaatattgttcacaaataaccttctatgaatagaaggttattttttaatgaaaacaaaatgcataaaataataatcagacattttaaggggattatcattaatttcattccaatttttaaatatgggtaacttaatattcttatttataggtctactaatgatcggtatcgtattatcagtctacgaaggcacaatgccaggcacactaccgacactattcttttcaaatgttcgttatagaacactgtcttggacatttaacatttcagtgtctgtgtttggtggtacgacacctttagtagcgacatggttggtacatgaaactggaaacaaccttgccccaggcttttattggttaatagtgagtattatttgccttatagttgtcgtgtttttatttaaagacacttcaaaacaatctttaaaaggctcttatccaactgtttctaatgaaaaagaatttaaaatagctgttgaaaaccctaaagattcattatggtagcattcagaaagccaacaaaataaataatctattaattacattatgaaacagcgatgtactttttaatgatttcattttacttataacaaatgaaatcattgaaaagtatttttttatttaaaaataagcatataggttatgaatatatacgagtcacttttacaagtaatttagtttaacaaattttaatcatctaattatttagttatggttataaatcggattgtttggacaagactgcaaatgcgcattatacaatccagcagcctctaaaaatgaaaaaactgttactggacctaaaaatttgaacccataactttttaaagattttgaaagttttgttgcacgttcatctacagtaattcggtcactaggttgtttgtaaccacaattaatgggttcataatcaacagttgaccataaataatcactgaaactaccgtagtctttttcaatttcaaagtaaccttttgcttgacttacaattgcttctaatttttttctgttatgtacgatattagggaaagtcattaattgatcaatatccttatctgtcatttttacaatttgatgaggatcgaaatcataaaatgcttgttcataggattcttttttctttaatattgttaaccatgaaagaccagcatgttgagattctagtgctaagagtttaaacaatttgagactatcatatagtggttgcccccatacttcgtcatgatattttaaatagatcggatttttggtaccaaatgcacagtcgttcataaatttcactccattttattgacttattttaacatccattatactataattaagtaaataaatattgtctactgggaagagtaaataggcttgaatttaacagagagtacaagaatgctgaaaatgtacaatttaacttattgaaggtagcccacattgaactttaactgaacactaatcatatgaagatatctgtttaataggttaaagcgtgcttgagcgttaatcatgtaattaagtgcttgaaattagtttgtaatttcttgaatttaggtggtaccacggaatatccgtcctattttgatagggcggatatttttatttttaaggaggattttaacacatggaaatgaaaccaaaatataatccaagggaagttgagtctggacgttatgaccaatgggtaaacagtggatattttaaaacaaaagatgatcaatctaaagaaacatatacaatcgttattccgcctccaaatgtaactggtaaattacatcttggtcatgcttgggatacaacattacaagatatattgacacgtatgaaacgcatgcagggttacgataccttatatctgccaggcatggatcatgcaggcattgcgacacaagctaaagtagaagcaaaattaaatgaacaaggtttatctcgacatgatttaggaagagaaaaattcttggagcaagcatgggactggaaagaggaatatgcaaactttatcagacaacaatgggctaaacttggtcttggtctagattatagtagagaaagattcacattggatgaaggtttaagtaaagcagttaaaaaagtattcgttgatatgtacaataaaggtttgatttatcgtggcgaatatattattaattgggatcctattgcgcgcacggctttatctgatattgaagttatacatgaagatgtgcaaggcaaattttaccattttaaatatccttatgcagatggtaatggttatattgaaattgcaacgacgcgtccagaaacgatgttaggtgacactgcaattgtggttaacccgaatgatgaacgttataaagacgtaataggtaaaacagttattttacctattgtaggtagagaattaccaatattggctgatgaatatgtagatattgaatttggtagtggtgcgatgaaagttacacctgcgcatgacccaaatgattttgaaataggtaatcgacatgatttagagcgtattattgtcatggatgaatcaggtaagatgaatgacaaagctgataaataccaaggcatggatcgttttgattgtcgtgaacaattagtaaaagatttagaagcggaaaacctagtcattaaaattgaagagcatgaacattcagttggtcattctgaacgttctggtgcagtcgtagaaccttatttatctacacaatggttcgttaagatgaaaccacttgctgaacaagcattaaataaccaaaaaacagacgacagaatcgattttgttccagcccgttttgaaaaaacatttaatcgatggatggaagaaattcgagattggacaatatctagacaactttggtgggggcatcaaattccagcatggtaccataaggaaactggtgaaatatttgtaggtgagcatgaaccagaagatattgaaaactgggtacaagatgaagatgtcttggatacttggttctccagtgctttatggccgttttctacactaggctggcctgatgtcgaagcagatgacttccaacgttatttcccaacaaatgctttagtgactggttatgatattatctttttctgggtagctagaatgattttccaaggattagaatttactggaaaacgtccgttcaatgatgtattattacatggattggttcgtgcggaagatggccgtaagatgagtaaatcgctcggtaatggtgttgacccaatggatgttattgatgaatatggcgctgatagtttacgctatttcttagccacaggatcgtcaccaggtcatgatttacgttattctactgaaaaagtggagtctatatggaattttattaacaaaatttggaatgctgcgagattcagtattatgaatattggtgaagactttacggtagaacaagttgacttatcaggtgatttatcacttgctgacaagtggattttaactcgcttaaacgaaacaattgagaatgtaacggaattaagtgataaatatgagtttggtgaagtaggcagaacgttatataatttcatatgggatgaattctgtgattggtatattgaaatgagtaagataccaatgaatggtgaagacgaagcacagaaacaaatcacgcgctctgtacttacttatgtactagataatacgatgagaatgctacacccattcatgccatttgtgactgaacaaatttggcaaaatttacctcacgaaggtgaaacaattgttaaagctgcttggccaaaagtaaacgaagcgcttgtttttgatgacagtaaagaaacaatgcagcaactcgttgaaattataaaatctgtgagacagtcacgcttagaagtggatacacctttatctaaggcgattccaattttcattaaagcaaaagatgaaaatattaaagaaacattgttgaataattcaaattatatagatagattttgtcatccaagtgtattaacgattgatacaacaattgaaattcctgaaaaagcaatgacatctgtaacgacagccggtgaagttgtacttccattagaaggtttgattgatatggataaagagattgcacgtttagaaaatgaacttttaaaatgggaaaaagagctagatcgagtaaataaaaaattagcaaatgaaaacttcgtcaataaagcacctgaaaaagtgattaatgaagaacgtgagaaaaagcaaacctatcaagagaaatatgatggtgttaaattacgaattaatcaattaaaagcataggagtccttaagatgaattacctagatagcttatattggatacacgagcgaactaagtttggtataaagccaggcgtcaaacgcatggaatggatgctagagcgcttgaataatccacaatttaatataaatggtattcatgtaggtggtacaaatggtaaaggatcgaccgtttcatatttgagatcagcacttgttgataacggatatgaagtgggcacattcacttcaccatttatcgagaccttcaatgaacgcattagtttaaatgggaatccaataagtgatgatgagattgttgcactcgttcaacacgtcaaacccgtcagtgaagcattagaaatagaaacagaacttggcactgctaccgaatttgaaattataacaacaatgatgtttttatattttggagaaattcatccagtagattttgttatagtcgaagcaggattaggtattaaaaatgattcgactaatgtatttaaaccaatattatcaatccttacaagtattgggttagatcatacagaccttttaggtgatacttatgtagatatcgcgaaagacaaaggcgctatcattaaacctaatacacctgttatttatgccgtgaaaaacgatgaagcacttaaagtgattagagattatgttgagcaacaagaggctgaaggcatcgaattagatcgcgatattagtattatttcagaagatgaagaatttacttatcgctataaagattatgaattagaaacactacttctgaatatggtcggtgaacatcaaaaagaaaatgcagctctagcgattacggcattaattgaattaaatgaagatggtatcgttgatttagatttcaataaaatgatagatggtatagaatccgtaagttggactggtagaattgaacaagtaaaagatcagcctttaatgattatggatggagcgcataatgtagaaagcgtagaagcgttaattagcacaattaagcaatattacaacatagaaaatatagatatcttgttttcagcaattaaaggaaagcccatcaatgccatggtagatcaacttaaaacgattgcatcgacattctatattactgattttgatttcccgaaagccttaacaaaagaagagatttttgaagacgtcagatacgatcaaaaagcacttgttgatgattatgttaagtttatagaaacttatgagggtgaaggtttaatcattactggcagtttatactttattagcgaagtaaaatctaaagtgaattttaatgagagcaattaggacataaatgatgcatattttaaagtatagcaatatgtctagttatatgagcttgagtttaatactacctaaactgaaacttattcgtaagtgctactaaaattctatatggtttactaatgttaaagttctttagtgaagcgtaactttaagattaacaggctgagacatcattgatgtttcagcctgttgttgttttagtttcaatgatatacgtgtgaggtaatatattattatgaagaaaatatgtatttatgatagaaattcaacgtagtaaacgggcgctaagcgtattgaatttcgtctaaaaatgaaacatatatttcctatttaaatttggtgttatatgatagtatttacgaaggggaggtatgagaataaaatggcagacaagaaattcccaaaagatgcaatgcgagttttaaaagagacaagccgaactttttatataccgattacttttttagaaaaagaattaaagcatacggtagcttctgcgtatctcgtattacgagcaatagatgaaattgaagaccatgaagcattaagtaacgatatgaaatacaatacgctcatgcaaataagtgaattatttaaggaaacattcgacgaggataaatatttacaaattttagcgcctgttaaaaatgacatgcctgaagttacaatacgattaggcgaatggatagatgcttgtccagaacatacgagagctgttgtattagaggcttcaagtgagatggcgtatggtatggcaaaatgggcgaaagccaattgggatatccatactaaagcggatttagatgactatacatattatgttgcaggacttgttggtgtgatgctttcacaactttgggatctttgcgctggcgttaaaacagaccgagatttagctataggatatggtcgaggtttacaagctgtaaatattctgagaaatcaacatgaagattatgaagaacgaggcgtaagttttgttccagatgattgggacagagatgacttgttcgaatatgctgaagataatttagctaaagctgatgcttatatgaaagacattaataaaaagacaatattattattttgtcgcttaccattggcacttgcacataaatcgcttaaagcgatgcaaaatggacgtgaaaaaatatcacgttctgaagtagaagaaacagttgaagaaatacaaaaagattaatgatgcattaaaaatgtctcagttagaattaataaagaaacagcaatcaaatttatatttgattgctgtttctttattttagtgagtatatacaaactattgctaattataactttcatttcagaacaaaaaataaatttaaatttaagattatattaatattatctgtttttgttaattttgttatttaataaataaatcatgttataatgggtgataggaggtgcttaagtgtttctattgtttttaatttgccctattttatttagttatttatatcagttaagttttgtagagaagcttgatttgacttactttaaattacgttcgcattgcgattattgttatcgacaacttcgaatttatgaaatgatcccgatatttagctttttatttcaaagaggtaaaacgacatgttgtaataaacaactcaatcgttgttatttcgttggtgaaagtcttgctttattaccagtattttttgtactacaatataacactttattaaacatagattattccacttttttactcgtaagtagtttacttcatttaatatatttcttttgtaataaatcaattggatacggagacattcttgtcttctctgtattagcattagcactgccgttttctttatttagatacctttttttatttacttttattatcggtggcgtatttgcgttatttcatttcatattttttagaaataccaaacagtgtgtaccactgattccttttatcttttttgcatttaatctcacaatcatattccaacaaagtataagctacggagtgaagttcttatgaaaataaatgatctcgcaaatcatcaaaaacccagggagcgtatgttaaattatggtgcctctcatctatcacatgctgaattactagcaattttaattaatactggtagaaaaggatattctagtttagatattgcgaatgaattacttaaatctattgtgaatttaaaagaattaaagcatctatcaattaatgatttaaataaaatcaaaggtgttggactatacaaagcactcactttaaaagctgcttttgaattaggtgaacgaatgcattctggaagtgttgatgataaaattcaaatcaataaccctaaagatgcagcagactttatgatggggaaaatggaacatttaactcaagaaaaatttatagcgttatttttaaattctaagaatatcattatcaagcaaaaaacaatttttatggggacattgaatagtgctattgtgcatcctcgagaaatctacagtgaagcagttaaatgtgcaagtaatgcaattattgtccttcataaccatccttcaggcgatactacaccatcactagaggatattaaaactacagatagattacgagaatgtggagatatattaggcatacaattattagatcatgtcattattggtgatcatacatatttaagtatggttgaagaaggttactttgacatataatagaatgtctaatttcaattttttgttataaaatagatgaggtataatgaaatagttaactaaggagggagaatgtttggggattttatttttaattgggctattaattccatttgtatatttaatgcaactgacaaaaaagaaagtagctattaatttgaaacggacaataaatacaattgtcatctcgatcattagtgttttaatagtaaccattttatttattgtctttaatcatgcgaaaattgagatatggcatactgttatcagtgcaatcattgtatcaatcgtatgggcattattattaagcgcgtgttattatgtttatcaaatactttctaataatgtaaaaaaataagttgtttctcttaaatatagtaatagttgatgtatgactgaattaagtatgattaaattttaaccatgaatgcattataaaaataatttgatgtagaaagctaaaatcaaaatttcgattaatcatttcatgctccaattcaagaatggatgacaatgttacggttcatctataaactaaagcgcatgcaaaaccatcgctaattttgagttaaaaacagttttataacgtagagatgtttatcactatgcattaaaaaagcctgaggcatctattcatgcctcaggctcagattattcacatgcatcttactcaaatgaatctattcactgttttccaatttcataaatattaatttaatttataaagttgaaatagtagttaaaatgatccatgatccaaagaattccttgatatcctaagtagatacataatacaatgattccaatatatattaaaactcttaataaagataaacctactctaaataatagtataaccaagagggcaagcaggattatagataaaatattcattctatgttcactccctttgcttttaattgtactatgaattgaatgactattcatcagtctatggggaactttttaaatactacttcagactgatgattttttatgggtaaaattttataatttaacatgacttaataggaggatggttcatgcgttttatatttagcatcattaaaaatattgtagcaattatagcaatcgttattattgtattctttgcgcttaaatatgcaccttttttaaaagaccaacaatggaatccagttagtaacgatgaaccatctgtaaaccatacgcaaacgaaaaaagatttagctggaggtcaacgttatactgttaaagataatgatatattgaataacgtgccactcagccaaactaaaaatgtttttgattggatagataaaaaagaattcatgtctgtatctggcatatacaggatgggatacagtgatgattatttagctggtcagcgcggagatgaatttattatttataaatttggctcagattcaatcagagtatatagaacagaaatagagatggagcaagatttaaaccaactgggtgaacatatagaactattaccaccttcaagctacgagtaaggcgtttgaattctatgctaaaatgcgttagccttatataagtaaaaacgttaaaggttggtgtctaattatgagtgaagaaaaatctaatgataaaaaagtagatgagcaagctaaagcacaaaatctatttgcacgttggagaaaagaagaaacattatataaagaagatgaaaaagaagccgaaaagaacgctaacactgaaacttcagaagaagataaatcataatatttagttcataggtaattaagtctgaaaccaaaacgtttcaggcttattttattataatgtaacgacttttatttgtttgaattgtagtttcagatttgaacaatgggtgggtaactatactatgttttatatagataatacgtcttagcactttatttatttaatatggatcattttaatacactattcacgttgaaaattgttataatacaatgtatcgttctcttatatattaattaaaagtagtttgttaaagtttgtatttgtagaatacctaaacaaaaagaactgatttgaaaattattgaggttcatgctttatttcaaactatgagtaatataaaatgatagaagaacataaaatagtcgtgtaatagaggtgtttaggttgtcaaagttttttaaaaacaacaaattgattgttattttgtgtgcaatcattgtgtttattgccttaataggcgtgtctttacgttcgcaatcgcaatcaccggtagaacaatacgtaggggattctgtagcgtttggacaaaaagcggtaagttatcctgtgcaatttgtgactggatcaattaataatctattttcaaacgatggttcaaaagagcaatcgaaaaaattgaagcaattagaagctgaaaatgaaagattagaaagtgaaaataaaaagtataaaaaagaattggatattgaagatatatctaagtttgaacccatctctagtacggttttatctaggaatccagatcagtggatgaatacattaatcattaatcaagggtctaaagatggcattcaaaataatatggctgtcatgacatcagaaggcttagttggtcgtatttctaaagttaatcaattttcatctcaggttgatttgatttcaaccaatacacgtgccaatcgattatcagtaaatatccaacacgatagtaaaaatgtctttggtttaattgatcattatgattcgaaaagtgaagaattagtaattactgatattaataacaaagatagcattaaaaaaggagataaagttgttacgagtggtttagcggatcaactacctagcagtatttacataggagaagtatctaaagttgaaaatgatgagtatgggctatcgaaagaggttcgagttaaaacggcagctaatttatcagacttaaaccatgtttatgtagctaaaagagatcctaagacgatacctgacgatggaagtggggataattaatgcgagctttatactactttctaatcggtatagttttattctatattgacacagttattgggttagtcattccaatgcaaataggggataaggacattgtttttgtacctcatttgacgcttatgtatttactattaatttgtgtttacagaagctttggtgttgctatgattttagctgctgtatttggaatagtaacggacctttatttcggtagtttttacggattatatttatttggcttcattttatttgttgtcatcatggactttttctttaaaacgttttatagagataacacgatgctatttattacggtttggttaagtacgatattcttagaaatatacgttgcaatcatttatagtatattaggtttaattgcatttaattttatagactttattgttttcagactaataccaacactaatattaaatttcattttattagtgatactatatccaattattactaaattcttcagaaaagtacaaatgaagattgacagtaagtaatcgtaatgctaaaatgcagtagttgagtagtttttagctacatacaaccgctcggattcaggttaaagtacatgtatgtcacctgagtttggcgtgacttaaattattaggaggtgcaaagtatgtttgctattattgaaacaggtggaaaacaagttaaagttgaagaaggacaagaaatcttcgttgagaaattagatgttaacgaaggtgattcatttacttttgacaaagtattatttgtaggtggagatgcagttaaagttggtgcgccaactgttgaaggtgcttcagttactgctacagtacaaaaacaaggtcgcggtaaaaaaatcactgtattcacatacaaacgtcgtaaagactcaaaacgtaaaaaaggtcatcgtcaaccttacactaaattaacaatcgacaacatcaacgcgtaattatgattactgttgatgttacattgaacgatgccggtcaagtaactgatgttatcatggatggtcatgcagaacatggcgaatatggacatgatatagtttgtgcaggtgcatccgcagttctcttcggaagtgttaatgctataatgggattaacaagtgagaagcccgacattgattacaatgatgacggtggatatttccacgttagaagtgtagacactacaaatgaacaagcgcaattaattcttcaagcaatgctcgtatcattgcaaacaattgaagaggaatataaagaaaatattagactaaattataagtgaggtgcaagaatatgttaaaattaaacttacaatttttctcatctaaaaaaggacttggttctacaaaaaacggtcgtgactcagaatcaaaacgtttaggagctaaacgtgctgatggtcaatacgttacaggtggttctattttattccgccaacgtggtactaaaatttatcctggtgaaaatgtaggtcgtggtggcgacgatacattattcgctaaaatcgacggcgttgttaaatttgaacgcaaaggtcgcgacaaaaaacaagtttctgtatacgcagcagctgagtaatttttgtcatcgttaacaccagaagtgatcacttctggtgtttattttttgtctttattttctagttaatgagataatgatataataaaaaagatatagaagtttaaaatttgaaaaaaagaggtgaaatcatgtttgttgatcaagttaaaatatcgcttaaagcaggcgatggtggtaatggtattacagcttatcgcagagaaaaatatgtaccatttggtgggccagccggtggtgacggtggagatggcgcgtctattatatttgaagttgatgaaggcttacgaactttattggattttagataccaaacacatttcaaagctaaaagaggtgacggtggtcaaagcagcaatatgcacggtaaaaacgctgaaccccttgtcttgaaggtaccaccaggcactattattaaaagtgcagattctgaagaagtattagcagatttagttgaaaatggccaacgtgccgttgtagctaaggggggacgtggaggacgcggaaactctcgatttgcgtcaccaagaaaccctgcgcctgattttagtgaaaacggagaacctggcgaggaaattgaagtaaccttagagttgaaattacttgcggatgttggacttgtaggttttccgagtgtcggtaaatcaacattgttatctatcgtttctaaagctaaacctaaaattggagcataccactttactacaattaaaccaaatttaggtgtagtatctactaaagatcaaagaagctttgttatggctgacttaccaggtctgattgaaggtgcttccgaaggtgttggattagggcatcaatttttaaaacatgttgaacgtactaaagtaatcgtacatatgatagatatgagtggttctgaaggacgagatccctatgaagattataaagtaattaacgaagaattaagcgcatatgaacatcgtttagaagaaagaccacaaatagtggtagcaaataagatggatatgccgaatgcagaagataatttagctttattcaaagaagaaataaacgacgattcagtacacattataccgctttctacatttaagcatgaccacatagatgaattactttatgcgattgctgataaattagaagcagttaaagacattgacttcagtaaagatgaggaagaagatttaggtgtgaatagagttgtttataaacatacgcctagtcaagataaattcactattactagagatgatgatgctgcatacgttgttagtggtaaggcaattgaaagaatgttcaagatgactgatttcaatagtgatccagcagtacgtcgtttcgcacgtcaaatgcgctcaatgggtattgatgatgctttaagagcacgtggttgtagaaatggtgatatcgtgagaattttaggtggagaatttgaatttgttgaataggagtgcataatatggacaaaaaagattacaaaaagttttacttaattcgtgaggatgtattacctgaatctgttgtgaaaactttaaagataaaagaagtcttaaaaaatgatccatcactgtccatatttgaagctgttaagcaatttgatttatcaagaagtgcattctataaatacagagatacgatatttccaattgatgaaaaaatcgaatcaacaagagagtttacgttgatattatacgtaaatgatattgtaggcatgttagcagaagtactgaatacattatcgaatttagatttatctatcttgacaattcatcaaagtataccgatggaaggtagagcaaccatcacactttcattggatgctacaagtaccgatttagagattgatgatgtaatggaagcattaagaatcgttgatcatgtttctaaagtggaattaattagtatgactatataaggaagtgtattcatgtacgcatatattaaaggcacattaactgaattaaaccctacacacgtagttgttgaggcttcaggtgttggttatgaaatacaaacgccaaattcttatcgttttcagaaatacatggaccatgaagtggttgtacatacatcacttatcgtgcgagaagatgcacaattgctttacggttttataaatcaagaagaaaaagatatgtttttaagcctaattaaggtaactggcatcggacctaaatcagcattggctatactcgcaagtagttcaccaaacgatgtcaaaatagcaattgaaaatgaaaatgatgcttacttaacaaaatttcctggcataggcaaaaaaacagcgagacaaattgtattggatcttaaaggcaaggtccaaattaatgatgtagacagtggccaaattttaaatatggatactcaggaccacgctaatgcaccgattattaaagaagctttgcttgctctagaagctttagggtactctaaacgagaattaacaaaagttgaaaaatcattgagtaaagaaacatttgactcagtagacgatgcggttaaacgaggcttacaattacttatagcataaatatacaattatatttaaaaagggggtaaaaaaatggatgatagaatggttgatcaatctatgcatgatgaagaatcttcatttgagttatctttaagaccaacgaaactacgccaatatattggacaatctacgattaagtcaaatttagaagtgtttattaaagctgccaaaatgcgacaagaaccgttagatcatgttttattatttggtccccctggtttaggtaaaacaacattatcaaatattatagccaatgaaatggaagtaaatatcagaatcatttcaggcccttctatagaacggccgggtgatttggctgcaattctttcaagtttacaacctggagatgtgctatttatagatgaaattcatagattgagtagcgttgttgaagaagtattgtatccggcgatggaggatttctttttagatattgtcattggtaaaggtgaggaagcacggagtattagaattgacttaccgcctttcacgctaattggtgccacaacaagagctggtagcttaactgcaccattacgagatagatttggtgtacatttaagacttgagtattaccaagagcttgaattaaaagaaatcatcgtacgtacggcagaagttttaggtacctccattgacgacgaaagtgcaattgagttagctaaacgtagtcgtggtacaccaagagtagcaaataggttgttgaaacgcgtgcgtgatttccaacaagtcaacgaagatgaattaataagtattgccacaacaagagcttcattacaattacttcaagttgatgatgaaggtttagattatattgatcataaaatgatgaattgtattttagaacaatataaaggtggccctgttggcttagatacgattgcagtttcgattggtgaagaacgtgtaactatcgaagatgtttacgagccatttttaattcaaaaaggatttatagaacgtacaccaagaggtagaaaagcgacaccttatgcatttgaacattttagcaagaagaatagaaagaaggaataagtttggatattgaagcatttgattatcacttgcctgaagcattaattgcacaaacacctctgaagaacagagatgaaagtagattgctaattcttggcagacaatctggtaatattgaacataaacattttaaagatgtcacagattaccttaatgaaggggatacacttgtattaaatgatacaagggttatgccagcacgtttatttggaatgaaagaagaaacaggtgctaaggtagaaatgttaatgcttactcaaatcgaaggcaatgattgggaagtattattaaaaccagctaaaagaattaaggttggtaacaaattgacctttggtgaagggaaaatcatagccgaatgcattgaagaactggatcaaggtggtcgtatcatgcgattgcactatgatggtatccttcaagagcgtttggatgagctaggtgaaatgccattgccaccatatattaaagaacggttagatgatcaagaacgttatcaaactgtatatgctaaagcatcaggatcggcagcagcacccactgcaggattgcatttcacagatgaattgttagaacgtattaaagctcaaggtgtaaatatagcttttattacattacatgtaggtctaggaacatttagaccagttagtgtagataatatcgatgatcatgaaatgcatagtgaatattatcaaatggatgaagctacagcaaaccttttaaatagtacaagagacaatggtaatcgaattatttctgttggtacgacttctacaagaactttagaaacaattatgcaatcaagtgatagatttgtcgctaaaagtggatggacagatatttttatcttccctggatttaattttaaagcaattgacggattaattaccaatttccacttaccaaaatcaacactcgttatgcttgtgtctgcttttagttctagagattatatcattaatgcttacaatcacgctgtagcttcagaatatagattttttagttttggagatgcaatgttaattatttagggaatgaaaggggattttatatgccaacgccagctgttacatatgagcatattaaaacttgtaaacaatcaggtgcaagactaggtatcgttcatacacctcatggttcgtttgaaacaccaatgtttatgcctgttggaacgaaagcaaccgtaaaaacaatgagtccagaagaattacatcaaatggaaactaagattatactaggtaatacatatcatttgtggttacaaccgggaaatgatattatcagaaagagtggggggttacatcagttcatgaactggaatggtccaatactgacagattctggtggtttccaagtatttagtttaagtaatttaagaaagattactgaggaaggtgtagaatttcgccatcatacaaatggatctaaactatttttaagtcctgaaaaatctatgcagattcaaaatgacttaggttcagatatcatgatggcatttgatgaatgtccacctatgccagctgaatataaatatgtgaaagactcgattgaaagaacaacaagatgggcagaacgctgtcttaaagcacattcgagaccagaggatcaagccttgtttggtatcatacaaggtggagaatataaagatcttagaaagcaaagcgctgaggagttagtagctttagattttcctggatatgcgattggcggattgtctgtaggagaacctaaaccagtgatgtacgatatggtacaccatacggaacaatttatgcccaaagataaaccacgttatttaatgggcgttggctcgcctgacgcattaatagaatgtagtattagaggcatggatatgtttgactgtgtattaccaacacgtatagcgcgtaatggtacttgtatgacttctcatggtcgtgtaatcattaaaaatgccaaatacgctgaagatttgggaccacttgatgataattgcgattgctatacttgtaaaaattatagtagggcatacataagacatttaataaaagcagaagaaacttttggaatacgtcttactacttatcataatttacatttcttgctgaaattaatggaaaatatccgacaagcaattcgtgaagatcgccttctagattttaaagaagaattctttgaacagtatggacttaatgttgaaaacccaaaaaacttttaaaagggagaaaaaataatgcaatttacttcattgatattaccaatattattattagtattaatgtggttcttcttaattagaccacaacaaaaaaaggctaaagagcatcgtgaaatgattagtcaagtaagctcaggtcaacgtgttacaacaatcggcggtatcaaaggtacggttcgtagtgttgacgaaacaacagttgtattaactttaaatggtaatggtactgaaatcactttagaaaaaccagctattaaacaagttgatccttcataataaatgttagaactgatatgtttatatcagttctttttttatatcttttaatcaaattaatctaatatataataagatgatgttggttattaggttaccttcagctagttataatgacaagtaagacctttaacgctatagagtgttataatttaatgtaataccatatatttaacattatacgaatgttagtcaaaactgggctttgctatcgttacaatgaaatatacaaggttaatttagttgagttagtttttacactcgttgtaatatgttaagatatataaggttgttgagtaaaattttctagtttcattaaacttgcattaatataatttaatcgagtattcttaaaacataagcttacaatgaggtgttcaagtgaagaaaagtagtagaatagttgcgttcatattacttgtagttttgttgtttgcaggcatgggacttacatataagaacgtagttaaagatgtcaatcttggattagacctacaaggtggatttgaagtcttgtatcaagttgatcctttacaaaaaggcgataagatagatgataaagcggtaaaagcgacagctaagacgcttgaaaaccgtgtcaatgtcttaggggtttcagagcctaaaatacaagtcgaagataataatagaattcgtgtgcagctagcaggtgtgaaaaatcaatctcaagcccgcgatatcttatcttcacaagcgaatttaacgattcgtgatgctgatgacaatgtcaaactgacaggtaaagatattcaacaagggtcagctaaacaagaattcaagcaaaatacaaatcaaccagcagttacttttaaattaaaagatagcgataaatttaaaaaagtaactgaagaaatttctaaaaaagatgaaaatgtcatggttgtatggttagatcatgaaaaaggtgatacttaccataaagaaatggataaaaaagatcctaaatacgtttctgcagcgtctgtagacaaaccgattaactcagatagtgtggaaatttctggtggtttcaatggtgaagaaggcgtagagaaagcaaaacaaatcgctgatttattaaattctggttcattaccagtagaccttaaagaaatatactcaaattctgtaggtgcacaatttggtcaagacgctttagataaaactgtattagcggctgcaattggtattgctgttatttacctatttatgttaggtttctatcgtttaccgggattagttgcagttatcgctttaacaacttacatttatttaacattaatagcgtttaactttatttctggtgtattaacattgccaggattagctgcgttagtacttggtgtaggtatggcagtcgatgctaatattataatgtatgagcggatcaaagatgaattgaagattgggcgaacgcttaaacaagcctataaaaaagctaataagagctctttcttaactattgtcgatgcacagctgactacagtcattgcagcagcagtgttattcttctttggtgaaagttctgttaaaggtttcgcaacgatgttattattaggtatcctaatgattttcgtaacggcagtattcttatcaagatggttattatcgttattaatatcatctaatttctttaagaaatccaaatggctatttggtgttagtaagaaaaatatccataacgctaatgaagaaaaagaaatacatgacttgaaaacaccatacgagcgcattgattttatgaaattagcaaaacctttattaggtttaagcgtgcttattattgttgtgggtgctatcatattatttattttcagattaaatttaggtattgattttacaagtggtactcgagttgattttgaatctaataataaagtcgacgagaataaagttacaaatactttagaaagtaaaggctttaaaccggatcaagtttctcttggtgaaaatgataaaaacgcaacagtacaatttaagcatgacttgtctaaagacgaagtttctaaaattcaagatacggtagaccaatcatttggtaataaaccgactgtgaacactgtatcaccagttataggacaagaattagctaaaaatgcaatgttagcactcatttacgcagcgattggtatcatcatttatattacatttagattcgaatggcgaatgggtctgtcatctgtacttgcattgctacatgatgcctttatgatagttgccgtcttcagtctatttagaatagaaatcgatattacgtttatcgcagcagttcttacaataattggttattctatcaatgatacgattgttacattcgatagggtacgggaaaacttacacaaagtaaaagtgattactaaaaatgaacaaattgatgacattgttaatagatctatacgtcaaacaatgacacgttctattaatactgtactaactgtacttattgttgtaattgcattgttgattttcggtgcgccaagtatctttaacttctcattagctttattaattggattaatttcaggcgtattctcatctgtatttattgcagtaccgctatggggtattatgaagaaacgacagcttaagaaatcagacaataacaaaatcattgttcataaagagaaaaaatcaaatgatgaaaagattttagtataaacaatcagtcattgaaattatagtgaaacggctttctgcataaattgtagaaggtcgtttttctttatcaaagtagtaactatatctttgttcaggcacttgatttttatttttaaatggaaccactttttatttttggatttcttttgtataatgacttgtggaaatgagggagaatagtatgattaaatcaaaatatacttgggacgttaaatcaccagaaaatgaaattacagaggatgtttcattagatttaaaactaactcctattgtaaaaaaaatattagagagtaaagaaattaccgataaagcagcgatagatcaattattaaaaaataaacaagttatgcatgatgcttggttgatgagcgatatggaaaaagccatagaacgtattaatttagccatcgatcaaaatcaaaaaatattagtttatggtgactacgatgcagatggtgtaacatcaacaacaatattagtagaaacattaaaagcattaggcgcacatgttgcttggtatatacccaatcgattttcagaaggctacggtcccaatgaaatggcttttaaaaatgcacatgaggaaggtatttccttaataataacagtagataatggtatacaaggtcatgatgaaatacagatgattcaagatttaggtgtcgatgttattgttacagatcatcatgaaattggtagaacaatgcctagtgcgtttgctattgtccatccaatgcatcctgagtttgactatccctttaaatatttatgtggtgctggtgttgcatataaattagcgcaaaatttattagatgaaccgccagcttattttcttggattagttgctattggaacggttgccgatttggtatcattaactgatgaaaacagagctttagtccaaaaaggtttagaaatactaaacgatcattgtccagcatcaattaaggcaatacttaaacaagcgggttataatgatgtaattacggaagaaacgatcggatttattattggcccaagattgaatgcggtaggtagactcgaagatgcagcattagctgctgagttattgatgactgataatgatgaagaagcagaatttttagcagaacaagttgaattctttaatcaagaacgaaaagatatcgttgcccaaattacagaagaagcattagctgctgctgaggatcaagtcaaacaagggacaaagtttttacttttagcacaggcagattggcatgaaggtgtacttggcattgttgcatctaagatagtagaaacatatagcttaccaacattgattttaaatattgatgaagcacaagatcatgcgaaaggttctgcacgcagtatagaacaagtctcaatgtttgaaattttaaatgcacattcagatttaatttcaaaatttggtgggcatcatatggctgctggaatcacaatgccaattgaaaatatcgaaagtttaagacaaggcttaaatgattggatggcacaattagcatcaacaacatcactagaaccgcgtaaaaaagtggatgttaaagtagcagaaacagatataacaatcaagaatattcaagatattcaaagacttagaccatttggtactgacttttcaagcccatgttttgaattagaaggcgtcatagtcaatcaagctaaagccattggccaagataaaaaacatttgaaaatggtattaggtgatagccaattgcaagctattttttggcagaatggtcatcttgtgaaagaactaggagaacagcaacctataaatgtaataggtacacttcaaataaatgaatggaacggatttcaatctccacaatttatgattcaagatttagcaagtaataatttacaaattttagattatagaagcaaaagtaaagtgagtggatttgaacaagactcaagtaacgttgcatatctcattcataacaagagtgaaaaattagatgataattattactactatggtgatacaattgaccaatcatatgataaatatgtatttagagatttaccaccttcaattcaagctataaaaacaacacttaaaacagttgatgtttctcaaatatacttggtgcttaatcacgaacgctcaatttattttgaaggtatgcccaaaatggaaacattcaaaaaatgctttaaagcattggcaactaaaaaagaaacagatttagctaaagaaggcatgcaattatgccaatttttaaatatacaaccaagtatgcttaaattcattctaaaagtttttcttgatttagagtttataaaagatgaaaatggtataattaaaatgaatagtgtttcaacaaagagagaaatagaatctagtaaatactatcaaggcagactagatagaatagaagttgaaaaagtgcttctctatgatgatttcgctaatttaaaaaaatggattaaaactgaactggtagataaataggaggaagtttgaatggatttaaaacaatatgtatctgaagttgaagattggccaaaaccgggtgtgaattttaaagacataacgacaattatggataatggagaagcgtatggttacgctactgatcaaattgttgaatatgcgaaacttagagacgtagatattattgttggacctgaagcgcgtggtttcatcattggatgtccagtggcatattcaatgggcattggttttgcaccagtgcgtaaagaaggcaaacttccacgcgaagttatccgttatgaatatgatttagaatatggcacgaatgtgttaacaatgcacaaagatgctataaaaccaggacaacgtgtattaatcacggatgatttacttgctacaggtggaacaattgaagctgctattaaacttgttgaaaaattaggtggcattgttgttggcatcgcattcataatagaattaaaatacttaaacggtattgaaaaaattaaagactatgatgtaatgagtttaatttcatatgaagattaaattaatctagtaaaagaagtcagatatgcacattttaaggcatgtgctatctggcttttttatttattcaaatatagactgttctaaatgatactttgaaatgaaaattagaataattttaaactggattttattattcgtatggcctacgcatttatttatttaataacatgtagtattatataactattatacaaaatttggcctaataacgtaaaaaaacgttataatcgaaaataatacaatgaatagaagctattgaagctaacgaaatataatactgggtatctaatagcgattaatatttagtataggggtgtcttaagtgaacaatgaatatccatatagtgcagatgaagtactatctaaagcaaaatcatatttatcaaaagaggactatgaatttgtattaaaaagttatcatatagcctacgaagcacatgaaggccaatttagaaaaaatggattaccttatattatgcatccaattcaagttgcaggtatcttaacggaaatgcatttagatggtccaacgattgttgcaggtttcttacacgatgtaattgaagatacaccttatacatttgatgatgtgaaaggcatgttcaatgaagaaattgcagtaattgttgaaggcgtaacaaaattaaaaaaagtgaaatatcgatctaaagaagaacaacaagcagagaatcatagaaaattatttattgctattgctaaagatgttcgagttatcttagttaaattagcagaccgattacataatatgagaacattaaaagcaatgccaagggaaaaacaaattagaatttctaaagagacattagaaatttatgcaccattagcacatcgattagggattaatacgattaaatgggaattagaagatacggctttaagatatacagattctgtacaatattttagaatcgtgaatctcatgaaaaagaaacgcagtgaaagagaagagtatattcaaaacgcgattaatcaaattcagtctgatttaactagtatgaatattgtaggggatattaatggtcgtcctaaacatatctatagcatttatagaaaaatggttaaacagaagaaacaatttgatcaaatctttgatctattagcaatacgtatcatcgtcaattcaattaatgattgttatgctgtgttaggtttagtgcatacattatggaaaccaatgccaggcagatttaaagactatattgctatgccgaagcagaatatgtaccagtcattacatactacagtcgtgggccctaatggcgatccattagaaattcaaataagaacctttgaaatgcatgaaattgcagagcacggtgttgcagcacattgggcatacaaagaaggtaagaaagtaactgagaagtcacaaaattttaataataaattgaattggattaaggaattagctgaaacaaataatacaacttctgatgctgaagagtttatggaaactcttaaatttgacttgcaaagtgataaagtctacgcatttacgccagaaagtgatgtaattgaattaccatatggtgcggttcctatcgattttgcctatgcggtacatagtgaagtaggtaataagatgattggttcaaaagtaaatggtaaaattgagccgatagattatgtgttacaaactggtgatatagtagaaatcagaacgagtaaacattcttatggtcctagtagagattggttgaaaatagtaaaatcatctagtgctaaaagtaaaatacgtagtttctttaaaaagcaagaccgttcttcaaatattgaaaaaggtaaattcatgattgaagcggaaattaaagaccaaggctttagagttgataccgtgctaacggatgataatatcgctgtcgttaatgataaatataattttgcaaatgaagatgatttatttgcagctgtaggctttggtggcgtaactgcactacaaatagtcaataaattaactgaaaaacaacgtattatcgataaacaaaaagccttgaatgaagcacaagaaattactaaatctgtaccaattaaagatgatattacaaccgatagtggtgtatatgtagaaggtattgaaaatgtattaattagattatcaaaatgttgtaatcctatacccggagatgatatcgttggatatatcactaaaggtcatggcataaaagttcaccgaacggactgtccaaatatcaagaatgaaaaagaaagattgatacatgttgaatgggtacgctcaaaggattcaacgcaacgctatcaagtggatttagaagtttctgcttacgatagaaacggtcttttaaatgaagtattacaagctgtcaattcaacacaaagcaacttagtcaaagtttcaggccgttcagatattgacaaaaatgcagtgattaatattagtgttatggtaaaaaatgtaaatgaagtttaccaagttgtagataaaattaaacagctcggcgatgtatacacagtcactagagtatggaattagaggtgcaaccaaatgagaatcgtagttcaaagagtgaaacacgcttcagtcacaaatgactcagtagataataaaataaataaaggctactgtttattagttggtgtaggaaaatcatcaactgaagcagatattgctacattagcgaaaaaaattgttaatgcacgtttatttgaggatgcagatggtaaattaaatttaaacttacaacaagttgaaggagaaatattgtctatttcacaattcactttgtatgcagatgttagaaaaggaaatagaccaggattcacacaatcgatgtcacctgattgcgctaatgaattatatgaacaattcaatgatactttacgctcatatggtattaatgtattaaccggtgaatttggtacagacatgcttgttgatattgccaatgatggtcctgtaacgattatttatgaaagtcaggatggcaaaatcatatgaagaagttcaatgattggttagaaaaacataatcttagaaacatccccacacttattgtcgttgttgcatttgtactctttgtttttatgaccattgctttcttaaatcataatgacgaagacagtagtacgatttatattactgaagatgctgaattgagaacaggacctagcgctgcttatcctgaaatacattcaattgacaaaggacaaaatttccataaaataggcaaaactggtaaatggatagaagttgtatccagtaataacaaagaaaaaggttgggtagcaggttggcataccaatttgaatattcaagcagataagaatcccaatgctaaaccattaaaagataaaacaattgtacttgatcctggtcacggtggtagtgatcagggtgcatcaagtaatacccacaaaaaaagcaaagagaaagtatatactttaaaaacggctaaagaattaaaagcacttcttgagaaagaaggcgcaacagtaagtatgacgcgtgagtctgatacttatgtaacacttgatgaccgtaatattaaaggtgatgcttatattagtatacataatgattcacttaaatcttccaaagcaaatggaagtacagtctattggtttaaagacaatcaaaaagcattagctgaaaccttaagtgcgagcttgcagaagaaagcgttattaaccaataaaggcgcaagacaagaaaactttcaagtattgagacaaacaaacgtccctgctgtcttattagagctaggttatattagtaatccaacagatgaagatatgattacagaaaaattacatcgtcatattgtagaacaagcaattgttgaaggactacgggcgtatttttcagaataaaaaggttgcatatttttaacaaagtcgttatcattgaatatgaattctatattaaaaccgatatgattcttgaaatttctaattgaaatggtagcattttaagtgtgtagagacataattcatggctgaaaaattatgcaaattaagttagaaatatataacacaagaacaggtgctttttaaaaaagccgcgtaacgagcgttaatcgtaagaagtgggttataaattacaacttataaccaattagggtggcaacacggaaattcgtcccttgtatgacttattagtcatgcaagggtttttttattgcataaaaggagagattctatgatcaatatacctagagggacgcaagatattttaccaaatgaaactaaaaaatggcgttttatagaagcaagattagatgaattaatggaagtatataattatcaagaaattcgtacacctatttttgagagtactgaattgtttgcacgtggtgtaggagattctacagatgttgtacaaaaagaaatgtatacttttaaagataaaggtgatagaagcattacgttacgtccagaagggactgctgcagtagttcgttcatacattgaaaataaaatgcaaggtttaccaaatcaacctattaagctttattataatggtccgatgtttagatatgaacgcaaacaaaaaggacgttatcgccaatttacacaatttggagttgaagcaattggtgctgaaaaccctggtgttgatgctgaagtattagctatggcaatgcacatttatcaatcatttgggttaaaacatttaaaattagtgattaatagtattggtgatatcgattcacgtcatgaatataacgaagctttagttaaacatttcgagccagttattggcgacttttgtagtgattgtcaatcaagattgcacacgaatccaatgagaatattggattgtaaaatagataaagataaagaagcagtgaaaactgcgcctagaattacagaatttttaaatgaaacatctaagcagtattatgcagatgtcaaacaacatttagatgacttaggtgtaccttatgttgaagaccctaatttggtacgaggcctagactattatacgcatactgcatttgaattaatgattgataatcctaactataatggtgcgataacaactttatgtggtggcggtcgttataatggattattagagttattagatggacctcaccaaacaggtataggttttgctttaagtattgaaaggttactgttagcacttgatgaagaaaacattgaactagatactgaacatgactttgatttattcattgttacgatgggtgaagaagcagatcgatatgcagttaaattacttaatgatttacgtcgaaatggtgttaaggcagataaagattacttacaacgtaaagttaagggtcaaatgaaacaagcggatagattaaatgctaattacacaattgttattggtgagcaagaattacaagaaaataaaattaacgttaaaaatatgcaaacaggtgaaagtgaaagcgttgatttagataaattagttaattattttaaaaaataaggagaagataaaatgagtaaacgtacaacatattgtggtttagtaacagaatctttattagatcaagaagttacattaaagggttgggtacacaaccgtagagatttgggaggattaatttttgttgatttacgtgaccgtgaaggttatgtacaaatcgtgtttaatccagatttttctgaagaagcattgaaaactgctgaaaccgtaagatcggaatatgttgtagaggttaaaggtctagttaaaaaacgtgaccctcaaacagtcaatcctaaaattgcaacgggtcaagtagaggtgcaagtatcagaaatcaatatcattaataaatcagaaacgccaccttttgctattaatgaagaaaatcaaaatgttgatgaaaacattcgattgaaatatagatatcttgatttaagacgacaagaattagcacaaacttttaaaatgagacatcaaacaacacgttcaataagacaatatttagataaagaaggcttttttgatatcgaaacgccagtattaactaaatcaacgcctgaaggtgcgcgtgattatcttgtaccttctcgtgtacatgatggagagttttatgcattaccacaatcacctcaaatttttaagcagttattaatgattagtggttttgataaatactatcaaatcgtcaaatgtttccgtgacgaagatttacgtgccgaccgtcaaccagaattcactcaagtcgatatcgaaatgagctttgttgatcaagaagatgtcatggatatgggtgaagaaatgttgcaaaatgtcgtaaaagatgtcaaagatgttgaaattccacgtccattcccaagaatgacatataatgaagcaatggaacgttatgggtcagataaaccagatacacgttttgaaatggagttaattaatgtatctgaacttggcgaagagatggacttcaaagtatttaaagatgccgttaataatgatggccaagttaaagcaatcgttgcaaaaggggcagctgatcaatatactagaaaagatattgatgcattaactgaatttgtaaatatttatggcgctaaaggattggcttgggtcaaagtggttgatgacggtttaagtggtccaatcgctagattctttgaaacaacacatattgaaaaattacaatcattaacaaatgcagaatctggagatttagtattatttgttgctgataaacccaatgttgttgctcaaagtttaggtgcacttagacttaaacttgcaagagagttagacttaatagacgaatctaaattgaatttcttgtgggtaacagattggccattattagaatatgatgaagatctcaaacgctatactgcagcacatcatccattcacagcaccaaaacaagaagatattgaaaaattagatagcgaacctgaaaatgcacaagctaatgcatacgatgttgtgttaaatggttacgaattaggtggcggatcaatcagaatccataacggagagctgcaagctaaaatgtttgaagtcttaggctttactgaagaacaagctcaggaacaatttggtttcttacttgatgcattcaaatatggtgcaccaccacatggtggtattgcgttaggacttgaccgtttagttatgctattaactggtcgtacgaatttacgtgatacgattgcattccctaaaacggcttcagcaacgtgtctattaacagatgcaccaagtgaagtttctgaaaatcaattagaagaactatcattacgtatacgtcattaatatgttcacgaagttttaattcttgctatattttaatattgtgttatgattattccataagatagtcatctgtagtgttcgtaagtttgcttcatatttgggcctaacactctttgatccgggagcccaatgggttttcttgcagcgcacacgcctcatttaggaggacttgcaaaacaagaaacagggcacccacctgttataagcaggccgaatgatcaagcattttataactacggcactaacggactctatcggtacgcaagacttcggtcttgcgtatttttttgatattaaacgataaactatacttttaaaatacatgaacgacgaaaatataattttgacaatatgatttttaaaataaataattttttatgaataaggagtatgacatgaaacaccaattttctagaaatgaattagcatacggtcaggaaggcctggcgcttttaaaacaaaagactgttgttatcttaggtgtaggtggcgtaggttcattcgcagctgaggcacttgcaagaactaatattggacatattattcttatagataaagatgatgttgatattactaacgtcaacagacaacttcacgctttgacaacaaccattgggcaaagtaaagtaacattgatggaggaacgcattaaacttattaatcctgattgtaagttgacacctctacatatgttttatactgaggatacatatgaggaattatttaataattatgatatcgattattttgtcgatgcaagtgatacaattatgtataaagttcatcttatgaaagagtgtttggatagagggatttctgtgatttcgagcatgggtgcggcaaataaaacagatcctacaaaattccaaattgccgatatctcagaaacatatatggatccaatggctaaaatcattcgtagaaaattaaaaaaattaggtataaccaaagggataccagtggtcttttctgatgaaagtccaatcgtcattagagaagatgttaaagaaactgttggagacgcaaatgcttcaacaagaaaggcacaaattccaccttcatctaatgcctttgtaccgagtgtagtgggtttaattagtgctagttacgttgttaatgacattttaaaagatatacctgtaactagaattaaggataaaaaataataagtgctacaaaagactatttttgtgcgatgtttaatttaaacaattaaaagtaataataaggcctaaattaaaaagcgctaatccatcttcattgggttagcgcttttcatatttgtaaggattaaaatagaaagtgatttcatcatatttgaggtaatgtggctttagcctttatttttttgctgcgattgattaatatgatcgaacacagctttaaattgttgctcactttttgaagttgtttttggttcatagtatattctatttttcaatttatctggtagatattgttgtgtgacaaaaccattttcatagttatgtggatatttataaccaatagaacgaccaagttcttttgcgccagcataatgaccgtcttttagatgatctggtatttgaccaacatgaccttttctaatatcggaaagggctgcatcaatcgcattgatacctgaatttgattttggagataaacaaagttctatgactgcttgacttaatgggattctagcttcaggaaaacctaatctttcagctgattcaattgcagctagtgtacgttgacctgcacttggagaagctagtccaacatcttcaaaactgattacaagtaatcttctaactattgtgggtaaatccccagcttcaattaaacgggcaagatagtgtaacgcagcgttaacatcactaccgcggattgatttttggaatgcactcatcacatcataatgcatgtcgccatctttatcacttacaaaagcgcctttttgtaggcaatcttttgcatcttgcaaagtaatatgtcgttgttgatcaatattttccgaactcaatacggctagttccaaggcatttaatgcactcctaacgtcaccttgactttgggttgtaaaataagccatagcgtcttcatcgacctttggattgtagctagctaaacctctttcagaatcatttaatgctctatccaatgataccctgacatcgttttcgtcaagtggatataactcgaaaatttgagcacgagatcgaatcgcaggatttatcgcatgatagggatttgacgtcgtagcaccgattaacacaatttttccattttctaaatgtggtaataaaaaatcctgtttcgctttatctaaacggtggatttcatctagtaataaaataacttgtccagacatttttgcttcttctacaatgagttgcatatcttttttagtatttgtaacagcgtttaactgtctgaatttaaattgagtacttcctgatatggctttcgcgatactcgtcttaccaataccaggaggtccataaaatatcattgaagaaagtcttttagtttcaaccattcttcgaataattccttttggtccaactaagtgttcttgagaaatgatttcatcgatattatttggacgcattcttgaagctaatggttcatttgtcaaaatctttcacacctttcttattctatattaacttaaaaaatgatagaatgttaatatatagtattcgaattaagtgaggtaatataatgaaaatttcaacaaaaggaagatatgggttaacattaatgatatcgcttgccaaaaaagaaggtcaaggatgtgtgtcattaaaatcgatagcagaagaaaacaacttaagtgatctgtatctagagcaattagtaggtacattaagaaatgccggattaattcgaagtgttcgtggtgcaaaaggtggctatcaattaagagtaccagcggatgaaattactgctggtgatattatacgcttacttgaaggaccaattacctttgtcgaaagcatagagtctgaaccacctgcacagaaacagctttggatcagaatgagagatgcggtaagagatgtacttgataatacatctttaaaatatttagctgagtataaagaaactaataacttagacggttatatgttttatatttaatgtgtaagccatcatttttaatagtttatatatctatgttagtaaaaaacaaaaattttttatttgtatgtttaattagtttactgagtggtatgtatattatatatcgcaaggaggtaattattatggcagatgaaaataaatttgaacaagcaaaaggtaatgtgaaagaaacagttggaaacgttactgataataaagaattagaaaacgaaggtaaagaagataaaacttcaggtaaagctaaagagtttgtagaaaatgcaaaagataaagctaacgaagttatcgataaatttaaaaaataatttacactaattcaattaattaaaaggagcgattcatatggctgaaaatttctctgaaaaagcaaaagaaactgcaaaaacagtatcagataaattaaaagatacagataatgaaaaagctaaacaagcatctgaacaaatcgataaattcactggtggcagtgataacgataataaagattataaaaaagaaaaagacgaaaaataatagtttattcgattaaataaaaagcacaacttacttttataaagtaagttgtgctttttaattgttacttgagttgatattccaatgtatagtacacttacgcgctctagtgcattgaattttattagcgttgtatatacatactgttatagagattcaatcacatgttttaatttacggtaagattctacctgtgcatcttgatcgtaaatgtaactgattgccattagttcatctatctcaccatgttcttctataaatgaatttaatttagctttcacagtttcttctgaacctatgagtgattgtgccattcgctgtttcgctaattcaaattcagtaggcgttaataaacctcttaaatcgtctgttggtggttgaactggctgcattcttcctctagttatactgaccatcacttgcgcttgtgtcgttgataaatattcagcttgctcatctgtatctgcgacgatggcgtttaaacaaacgataacataaggttcgctcaatacctctgagggttcaaataagtctttatatatttgtatagcatctttcatttgttgaggagcaaagtgacccgcaaatacataaggaagtcctttacgcgcagctaaatgagccgagtcagttgaagaaccgagtatataaataggaacgtttttgtttactgcaggatacgcgcgaacataagcctgtttatttgctggtccgaaataagttgtcaattgttcaacttcttcagggaattcataaacaccattatgctggtctcttcttaacgcgctagccgtcatcatatctgttcctggtgcacgacctaaacctaaatctatacgatttggaaacactgtttcaattgtaccgaattgttcagcgacaaccagaggtgcatgattaggtaacatgattcctccagatccaacacgtatttttgaagtatgttctagagtgtgttggatcaacaatgcggtcgctgaactgactagattaggcgcgttatgatgttcggcaatccaataacgctcataatctaaggattctaattgttgtgctaacgtcaccatatcttctatggcattctggtcattttgaccttcacgaattggcactaagttaagtgccgataactttaaatctttcataattaacgtaatcctcctttagataactaatataaagaattataacagtggtttttaaacttgcgtaagaaattgctcactgttataattaatgaaattaaaacgagaggtggcttaagaaaaatactatggataatgctcataaggtaaatatcaacgatgtacaagaaaataaaactattatgggataggcattgtctggttagtatttttatgtgaaagcaccttataatcttttacagttataatatttaaagatgtgtcatgtccttattgagagcgaggaagatgatatgtctttttatttttcagaaaaaccatttgaacagtttggtaaaatattgatagaagacgtaaatattgatatcgaactaggtgagcatgttgcaatgattggtgataatggtatcggcaagtcaacattgttaaatgctttaaatttaaaatatgaaacgcaatcatatttaatgaagcaagacttgacgcaagtatttgatttaaccgcgatgaactttatcatttcaatatttcctgaggttgcaactttgaaaacgcaaattgtaaccgattatgacaagataagtgattatatcgctttaaatggttatgagatagaataaaaaataattactaccgcaaagcgttttaatataagtgaacaagatttagataagccaatacgattattaagtgacggacaacaaacaagcgttgcattaatcagagcgtttatatctgaaaaaccgctaattatattagatgaacctacaaatcatcttgatcaagcaatgctagataatttaattatagaaataaataagtctaagcaaacgatactctacgtttcacatcaccgtggttttataaatcaaactgcgagtcatgtttatgaaatcactagaaaaacatcgagaaaatttcaaggtgattataatcaataccattcagtcaaacaattagaatttcaatctcataaaaatgcatatgataagcaacaaaaagaaatcaaagcgctggaagaatcaattgcacgcgtgaatgaatggcattcaactgccaaagctacgaccagtgtgcgtgaccctaaacaacaaaagcgtcttagcaaactagctaaaaaagcaaaagtaaaaaatgctcagttaacacataaattaaatgaaaagcagtttgagtctccggataaacaagatagaaagtttcattttaatgatgaacaattagtgcgtaatcgagaattagtgaaattagaagatatatgtataagtattgaacaaaaaataatttataacaaagcaaattttgaaattaaaaaagatgaacatattttattaactggtccgaatggtagtggtaaatcattactaattgcgcttataagacaacaagtgaaaccggataaaggtacagtttatgtaacgccttcagtaaaaattgcgtattttgatcaacaaaataataatttgaattacagacaaacaccattagatatggtcatgtcaatagatcatatgacacgtagttatgctcaaacaatcttggcttcgttcggttttgataaagataaaatacaacaaacgattcgttctttatctatgggtgaaaaaagcagattgcaatttgtactattgtttttttcaaatgctaatttactcattttagatgaaccaacgaattactttgatattacaacgcaaagcttaattttaaatatgatcaaacagttcaagggacaagtgttgattgttacacatgattcatatttgcaaaagcattttgatgcgacacattgggttgtaaaaaacaaacaattacttaatgttacaatgaatagtgaacaaaagattaatacgcagaatacgttgaatttattaaatgatttcagagatatagatgaaaatggccattttgaaacagacgactagaaaaataaattatatggtgctattattggaacattgataaaaatttaaggagtgtcaaacatggaagtatatgcagattatgctgcaacaacacccgtcaaacaagaagttattgataaaatgatggaagtctattccgtacattttggtaatccgtcatcaattcacagcatgggtagggatgccagaaaatacttagatgatgcgcgtcgtacaattgctaaatcgtttaatgctaagccaagtgaaatcatctttactagtggtgcaactgaatcaaataacactgcaattaaaggtattgcttatgagcacatgcacaaaggtaaacatatcattactactaagattgagcatcattctgtacttcatgtatttgaacaactcgaaaaagaaggtttcgaagttacttatttagaagtggataaagaaggattgattaaccttaatcaattaagaaatgcacttactgaagaaaccattttagtttcaattatgtttgttaataatgaaattgggactgttgaaccaatgtatgatattgaagaaattgtttcagaatcgaatgcattattccatgttgatgcagttcaggctattggacacttagaaattgatttccatgattttaatatggatgctatgagtattactgcgcataaatttggtggtccaaaaggtgtcggcgtacttttgcttaaagaagaaattaaattaaagtatcaacaattaggtggagaacaagaagcaaaacgtagagctggtactgaaaatgtgccacaaattgtaggtttagctgaagcaatcaaattagctaatgagcatagagatgaaaataatgtgcatcttatgaatttaaagaatttgtttctagtgtcgttacaagagcgctcagttccatttgaactcaatggatccatgacagattcaacaggacatatcattaatttatatttaccgtttgtagatgttgaaacaatgctcacattattagatttatcaaatatttatgtatcatcaggctcggcatgtacagcaggaacaacgacgccatcacacgtgttacaagcaatgtatagtgatgatgagcgagcgaagcactcagttagatttagctttaatgaacagacgacagaacaagaagttaaatatatagtttcagaaattcacaaaatataccataaatttagggaggaaatgtagttgtcaaataaagatacacgcgtagtagttggcatgtcaggcggcgttgatagttcagttacagcacatattttaaaagaacaaggatatgatgtaattggcatttttatgaaaaattgggatgatactgatgaaaatggatattgtactgcaacagaggattataatgatgtcatcgctgtatgtaatcaaataggtattccatattatgcagttaattttgaaaaagaatattgggataaagtgtttacttatttcttggacgaatataaaaaaggacgtacaccaaatccagatgttatgtgtaataaagaaattaaatttaaagcatttttagaacatgcgttaaaactcggtgcagattatgttgcaactggacattatgcacgtgtgcgtcgtcatgaagatggtcatgttgaaatgctaagaggtgttgataataataaagatcaaacatatttcttgaatcagttatctcaatcccagttgtcacgtgtgatgttcccaataggagatatagagaaaaaagaagtacgcagaatagcagaagaacaagacctagctacagctaaaaagaaagattcaacaggaatctgttttattggcgaacgtaatttcaaagaattcttatcacaatatttaccagcacaatctggagaaatgagaacactaaaaggtgaaaaaatcggcactcatgctggcttgatgtattatacaattggtcaacgtcacggattaggtattggtggcgatggtgatccatggtttgttgtaggtaaaaatttagatgacaatattttatatgtggaacaaggattccatcatgacgcattatacagcgattatcttatagcatctgatatctctttcgtaaatgatgtagatctagaaaatggtttcgaatgtactgctaaatttagatatcgtcaaaaagatacgaaagtatttgtaaaaaatgaaaacgaaaatgctatacgcgtgatatttaatgaaccagttcgcgccattacacctggccaatctgtcgttttatacgatggtgatgtatgtttaggtggcgcaacgatagatgacgtttataaagaatctggtcaactaagttacgttgtataaatattacttttgaattttattcgaaatcgttagtaagctattcaaaatagtaactaacgatttctttttttgaaattattatttcaaataccgtggtaaatgttataataagtagtcagaaatgagggttagaaatgaatcaagaacagatatataatttaattaaacaaggcaattttgaagaagcattaaaagcattatttgaaaacatagaagcaaatccaaaagaagtggaaaattacataaatgcagggattttattagctgaagcgaacgaagtagataaagcagaaaaattctttcaacgtgcaattactttagatccacaaaatggcgcaatctattataatctcgggaatgtatattacaatgaaggccgttttaatgaagcgattaaattgtatcaacaagcgttgaaatttaacgttgatcaagtcgatactaactatatgattggtatgtcatttagtcaattagaagcatttaaagaggctttaccttttttaatgactgcagcagaacaagatgaccgtcatgatgttgagattcaatttcagtatgggcttgtactttgtcatttagaaatgtttgagcaagcgataaagcaacttaagtcggtgttagaaatggataataaacattcagatgcattatataatttaggtttggcaacttatatgcagactgaagatacagcacaagcaatcgaatattttgaagctgctgtagacgcaaatccagaacatgttatgagtcagcatgctataaaaacatttaaatctatcgcagaggaggaataactgatgggagaccctacactatttaataattcaatgattaaaggaaccgttgatgcgattttatttcaaaataaagaaaatttttatacggttttaaaagttgatacaattgagtcaagtgaaacatttgattcaatgcctacgattgtagggtttttcccagaaattgctgaaggtgatgtttatacattcaaaggccaagttgttacacatccgaagtatggtaaacaacttaaagctgaaacgtttgaaaaagaattaccacaaactaaagaggcaattattagttatttatcaagtgatttatttaaaggtattggtaaaaaaactgcgcaaagtattgttaataaactaggtgaaaatgctataaacgatatcttgaatgacccgtcggtattagagcaagtacctggtttacctaagaaaaagcaaaaacaaattgctgaacaaattgctagtaatcaagagacggagcaaattatcatacgcttacatgatttagggtttggaccaaaactagctatggcgatttaccaagcgtatttaggagaaacacttaatgttgttgaaaataaaccctatcaactcgtatatgatgtaaaaggaattggatttaataaagctgataccttagcacgtaatgttggaatccagttcaatgatacagaaagactaaaagcgggtttgttatatgtacttgaagaagaatgtattaagcaaggacatacatatttacctactcaaaatgtattagaaatgactcaagatatgctttctcaagcacctagtgaaataatagaaatgcaacaattgaatcatgtattacaagaattggtaaatgataccaaactcattcaacaagaaaatgaagttgcaattccgagtttatattattcagaattaaaaagtgtgcagaatctttatcgcaattatgcgtatacgaataaactcaaacaaatagaacagtctgatcttttaatgaagattggagaaattgaagagcgcaatcaagttaattatgcaaattcacaaaaagatgcgttacagactgctattaattctaaaattatgctgctcacaggtggccctggtacaggtaaaacaactgtgataaaaggtattgtagaattatatgcagaaattcatggtctctcattaaattatgatgattatcaaaatgatgattatccagtcgtattaggtgcgcctacaggaagagcttcaaagcgtttggcagagtcgacaggtttagaagccatgacaattcatcgcttaatcggatggaatcaggatacacaaccggaagatattttagataatgaaatatcagcaaaattaattatcattgatgagatgtctatggttgatacttggctgtttcaccaatttttaagtgcagttccaatagatgcacaaatcattttagtaggtgatgaagatcaattgccttctgtaggtcctggtcaagtatttaaagatttaattgattcaaaagtgatacctcgtgttaatttaacagaagtttatagacaacaagatggttctagtattattgaattagcgcatcggatgaaactaggtgaaccgattgatataacccaacgttttcatgatcgaaattttataaattgtaatacagatcagattccgacagttgtggaaaaagttgtttcaagcgctgtgaataaaggctatgatatgagtgacattcaagtgcttgcaccaatgtataaagggtcagcaggcattaaaaaacttaatatggtattacaagatattttaaatcctaaggataaagatacacgtgaaatagaatttggtgatgtgttttttagaaaaggtgacaaagtcttgcaacttgtaaataggcctaatgataatattttcaacggtgatattggtgtaatcgtgggtgttttttgggcaaaagaaaatgcgttgaacaaagatgtattagtcgttgattttgaaggtaatgaaattacttttgttcgtcaagatttaatagaattaactcatgcttattgtacgtcgatccataaatcacaaggttctgaattcccaatagtcatcatgcctatggtaaaacaatactttagaatgctacaaaagcccatattatatactggcttaacaagggctaaacaatcccttgtctttttaggtgatccgcaagcctttgatattggtttaaaaacgcatggacaagtgagaatgacacagttatgcacatttttaaaagcctactttaataacgatgcatctactgaagaagaaatcagcgacacatttgatgctgatatcattctaactgaagacaatatttttaaaattaacccaatgattaatatgggagatatttccccatatgacttcgttgaagattgacatgtgacaagaaaataaatacaatataattaacttcacataaagatgagtaaattatactgagcgaaaagagatgtactggttggtgaaaagtacagtcggtatagttgaatgctactttgtgtcagcaagcataataactaattaagtgataagtgtatgttagggaattaaagtcagtcgtttgatctgtgtgatacttacaattaagattgaattaatttgttaacacttataactagggtggtaccgcgaaacgttcgtccctttatgaggatgggcgttttttattttcttttttaattatttaaagaactaacatgagttgagatggaggaattttaagtatgaaaaacttaaaagcaagtgaaattagacaaaattttattgattatttcgtagaaaaaggccatatggtagaaccttctgcaccattagtccctattgacgatgattcactattatggattaattctggtgtagctacactgaaaaaatattttgatggtagagaaacacctagaaaaccaagaatagttaattctcaaaaggcaattcgtacaaatgatatagaaaatgttggcttcacagcacgtcatcatacattttttgaaatgttaggtaacttttcaattggggattactttaagcaagaagctatagaatttgcatgggaatttttaacaagtgaaaagtggatggcaatggaacctaaacttctatatgtgacaatacatccagaggataaagaagcgtatagaatttggaatgaagacattggacttgaggaaagtcgtattattcgcattgaaggcaacttctgggatattggtgaaggcccatcaggtccaaatacggaaattttctatgatcgtggagaagattttggacaagatgatcctgcagaagaaatgtatccagggggagaaaatgaacgtttccttgaagtatggaatttagtgtttagtgagttcaatcacaataaagatcatacttatacaccactgcctaataaaaatattgataccggcatgggtcttgaaagaatggcatcacttgctcaaaatgtgcgtacaaattatgaaacagacttatttatgcctatcattcatgaagtagaaaaagtatcaggtaaaacatacttggaaaatgataactatgatgtggcatttaaagtgattgccgaccatattcgtacaattgcatttgccattgcagatggtgcactaccagctaatgaaggaagaggatatgttttacgtcgtttattacgtagagcagtaagattcagtcaatcattagatattaatgaaccatttatgtatcgtctagttgatattgtagctgacattatggaaccatattatcctaatgttaaagaaaaagcagactttattaagcgcgtcattaaatcagaagaagaacgcttccatgaaacattagaagaaggtctagctattctaaataacttagttgcacaagcgaaaacatctacccatgaaatcagtggtaaagacgcttttaaattatatgacacttacggctttccagttgagttaacagaagaaattgcgacacaagaaaatttatcaatagatatgcaaacattcgaagaagaaatgcaacagcaacgagacagagcaagacaagcaagacaaaattcacaatctatgcaagttcaaagtgaagtattgaaaaagattaccacagatagcacatttgttgggtatgatgttatggacaaagcctctgtcatcacagatattatccaaaatggtgaacttgtagaatctgcagaagcaggagagacgatttactttattttacgtgagacaccattttatgctgttagtggtggtcaagtggcagaccaaggtacaattagtaatgaaaactttgaaatcgcagttactgaagtgactaaagcaccaaatggtcagaatttgcacaaaggtgagattcaatttggtactgttaagaagaatgctgaagtttcagcgagtgtgaatcacaaagaacgtcgttcaatcaagaaaaaccatagtgcaacacatttattacacgctgcattaaaagaagtccttggagatcacgttaatcaagcaggttcacttgttgaagcagatcgtctaagatttgacttttcacactttggcccaatgacacaagaggaaattgacacggttgagcgtcgtgttaatgaagaaatttggaacagtattgaagtagatattcaagaaatgccaatttctgaagcaaaacaactaggtgctatggcacttttcggtgaaaaatatggtgaaattgtaagagttgtaaatatggccccattttcaattgaattatgtggtggtattcacgtgaacaacacagcagaaatcggtttatttaaaatagtaagtgagtctggtacaggtgctggagtgcgtcgaatagaagcattgactggtaaatcagctttcttatacttagaaacgattcaatctcaatttaacgcagttaaatcgcaagtaaaagtaaaatcagatgaccaagtattagagaaaatcgttcatatgcaagacgaagaaaaagagcttacaaaacaacttgaacaaaagaataaagaagtgacatcattaaaaatgggtgacatcactaatcaagtagaagaaattaatggattgaaagtcttagcaacggaagtagacgttcctaatgctaaagcaatacgtgaaactatggatgattttaaatcaaaattacaagatactgttattgtacttattagtaatatagatggtaaggtgtcattagtagctaccgtaccaaaagcattaactgataaagtgaaagcaggagatatcattaaaaacatggctcctgtagtaggcggtaaaggtggcggacgccctgatatggctcaaggcggcggtactgaaccaaagaacataacagaatcattacgtttcattaaagattacattaaatctctataagttgattcgattctaatgtagaatataagtaagaactttttttactcgatacaaaggagtgtaagaacaatggaaaattttgataaaacaatgaaatttaattatgatgaaattccaaaagaagatgtcaaaacagtattacaaaatgtctatcataccttagaagaaagaggatataatcctgtgaaccaaattgttggttacttattatcaggagatcctgcatatattccacgtaataacgaagctagaaatcaaattcgtcgtattgatcgcgatgatatcatggaagaattagtttcaaactatttgcaagagaaatcgaattagtttatgttaaagcataaaattataggattagatgtaggaagtaagactgttggcattgcaataagtgatctgatgggttggacagcccaaggattagacacactccgtatagacgaagagaacaatgaattaggtattgaagcattagtaaaaattataaaaagagataacgttggtactgtagttattggattaccaaaaaatatgaacaattctattggatttcgaggcgaggcttcgttacaatacaaggagcaacttcaagaagcactgccatcattagaaataattatgtgggatgaacgtctaagcactatggctgcggagcgttcattacttgaagcggatgtttctagacagaaacgaaaaaaagtaatagataaaatggcagcagtatttatattgcaaggctatttagactcattacaataaaaaggagcttttaataatgacagagcataaccatgattctcaattagaaattaacaatgaagaggaattacttacattatatgatgaagaaggtaatgaagtcttatatcgtaaagtattagaatttttccacccagaattcaaaaaagaatacgttattcttgctgaagaaggtgcagaatcagatgatgacgatttaattgaattggtgcctatgattaatgagccagatgaaaatggtgaaggtggcaaattcttaccagtggaaactgacgaagaatgggatatgattgaagaagtcgttaatacagaaatggatgatcatgaccacgatcatgaccacgaataattaaaaaatcgttctttaaatataagtcactatgaagtaaaccatactggaaaagcagtatggtttttttctgtaaataaacgaataaaaatcgaatgattaatgataattatatatttaagagttaactaactacggaatttatgcttatattatcggggtgtttatggtaaaatatataaagttaaattcaaacacatacgattttgaaattgcatttattaataatggaatagaccatataaatgttatatgtaaatatatttttcatctttactaaaattaaactagcacgagcaccaatgactagtgtgattgatagtctgtgcggtaactgattaagttgaaaatacaatgataatagatgttaaagcataatttctaaagaaaatatgatggtcatacataaaatgacgcattctagcgcaaatctataagtattttgagtttttaattggccatttttgccgggatggggcaaggaaccttatgtacaaaaggcttctatactactccctattttattgttaaaacttatgtattatattataacgaaggaagttttgaaaatggataataatcaatcctatttattaaatttacataaacaaaccgatgaaacgatagagtctttgagaccatatgcagaagcgaataacgtccctattgtagacagacttactttagaaatgattaagcaattgattaggctgcataaaccacaaaatattttagaaattggtacagcgattggctatagtgcaatgcaatttgcatctgtatctaaggatgtacatattacgacaattgaacgtgattcagatatgcaacagcaagcaaaagaaaatattaggaaatacgatttttcaaatcaagtgacattggttgagggtgacgcgttagagcaatttcataatgtcgaacaagaaagtttcgatatgatatttattgatgctgctaaagcacagtctaagaaattctttgaattatatacacctttattaaaagaaggtggcgtagttattacggataatgtactctatcatggctttgtttctgatatttcagttgtgcggactcgcaatgtgcgccaaatggttaaaaaggtgattgaatataacgaatggcttatgaataacgaagcttatacgactaactttttaaatattgatgatggattagccatttcaattaaaggagaatctaaatgacagaattattagtgacacccaaatcggttaaacatatcgaaacattaattgaaaaaggtgctgatgcctttgtcattggcgagcaaaaatttggtttgagattagcaggagaatttgataaagcagcaatgattgaagcagtggatatgattcatcgtaatggtaaaaaggcatatgctgcagtaaatggtatattccataactatcatttaagtgcagttgaagcttatattgattttcttcatgaaataaaagttgatcgaattatctttggagacccagctgttgttatgtatgttaaacaacacacagatccaattcctttacattgggatgcagaagcactggtgactaattattttcaatgtaattattggggagaaaaaggagctgcacgtgcacaacttgctagagaattgagtttggacgaaatccttaatatcaaagcccatgcgaatgttgaaattgaagttcaagttcatggtatgacttgcatgttccaatctaagcgtatgttgttaggtaattattacactttccaagaacgtcaaatgaagatctcccgtaacgatgaaacgaatgatttattattatatgacgaagaacgtgataataaatacccagtttatgaagattataatggaacacatattatgtcaccaaacgatatttgcttaatagaagaattggaaccattacttgaagcgggtatagattcactgaaaatagacggcatcttacagtcagaaagttatatcaatatttgtactgaacaatacagagaagcaatagatctgtataatgaggacccagatgcatatgaagatgaaaaattcatgcttgtcgatccaatagaagcaatacaaccggaacatcgcccgtttgacgaaggcttcttatataaacaaacagtatactaatggaggttaactcgtgaaaattttagaagaaattaatgttcaaaataaacctaaaatgaaaaagcctgaacttcttgcccctgctggtaatttagagaaacttaaaatagctatacattatggtgcagatgctgtttttctcggtggacaagaatatggtttgagatctaatgcagataactttacaatgccagaaatccaagagggtgttgcatttgcaaagcgttatggtgctaaaatatacgtaaccactaatataattgctcatgatgaaaatatagacggcttagacacctatttacgcgatttagcattaacaggtgcaactggtattatcgttgctgatccgcttataattgaaacttgtaaaaaagtagcgccagaattggaaatccacctttcaacacagcaatcactttctaattacaaagcagttgagttttggaaagaagaaggtttagatagggttgttttagcacgtgagacaggtgctatggaaatgaaagagatgaaagaaaaagttgatattgaaattgaatcttttatacatggtgcaatgtgtattgcttattcaggaagatgtacattaagtaatcatatgactgcgcgtgactcaaatcgtggtgggtgttgtcaaagttgtcgatgggattatgatttattacatattgaatctgatggggaattagatttatattatggtgatcatgaggttgcaccttttgcaatgagccctaaagatttgaaattaatagaatcgattcctaatatgatggatattggtgtagattctttaaaaattgaaggacgcatgaaatccatacattatattgcgacagtagtctcaatttatagaaaagttatagacgcatatgcaagtgatccagagaactttaagattaagccagaatggttgattgaactagacaaatgcgctaatagagatactgcatctgcatttatagaaggtacaccaggttatgaagagcaaatgtttggtcaacaaaataagaaaaattctgcttatgatttctgtgggttagtgttagattatgataaagcgactaaaattgctacagtacaacaacgcaataaatttgaacctggacaggaaattgaattttttggaccagaaattgatacttttcgacaagttgtggaaacaatttatgatgaagagggaaatgaacttgatgctgcacgccatccgttgcagatagttcaaattaaagtcgatcatccaatttatgcgaataacatgatgagaaaggaaattggataatgaaaagtacaacaataataggcattgccggtggttcaggatcggggaaaacatccgttacaaacgaaataatgaaaaatttagaaggtcatagtgttgcactattggctcaagactattattataaagaccaatcacatttaacttttgatgaacgtttagaaaccaattacgatcatccatttgcatttgataatgatttattaattgacaatttgaatgacttgaggaatggtaagcaggttgaagtgccaacatatgactactcaaatcatacgagaagtaaggaaacgattgcatttgagccaaaagatgttatcatcgtagaaggtatatttgcacttgaaaacaaaacattaagagatttaatggatgtcaaaatttatgttgatacagatgctgatctgcgcatattaagacgtctgcttcgtgataccgaagaaagaggacgtacaatggaatctgttattaatcaatatctgaatgtagttcggcctatgcataatcaattcatagaaccaactaagagatacgcagatattatcataccagaaggcggaagtaataaagtagctatcgatataatgacgacgaagattcaaactttagttagtaaacaatagtatttataagtaaaggaagatgacataatggaaaaccaaaagcaatatccaatgacgcaagaaggttttgagaaattagaacatgagcttgaagaattaaaaactgttaaacgacctgaagtcgttgaaaaaattaaaattgcccgttcttttggtgacttatcagagaactcagagtatgatgcggcaaaagatgaacaaggttttattgagcaagatatccaacgtgtagaaaacatgttacgtaatgcacttattatcgaagatacaggtaataataacgaagtacaattaggtaaaacagttacgattgttgaattacctggtgaagaagaagaagaatatcaaattgttggttctgcagagtcagacgcatttaaaggtaaaatttctaacgaatcacctatggccaaaagtttaattggcaaaaaattagacgatgaagtacgtgttccactaccaaatggtggagaaataaatgttaaaatcgtaaatatcaaataaattttagtgcaaatccccccacacatgttaaatgtctggggggattttacactttgctaaaatatttctatacttgcagactatattctgataaattgataacaattataaaattatttaggctatctatattgattcttttcatataagccgaattcattatttattataatctatgataattatttgctattaaacagaaatttataataaatgatataatagaaatgttgaatgtacaacttagtttgtttttataataagttgtgataattaacaaagggggcaacgtttctggaatataaaatcattaatgaacaaaccatcatgatttattttgatgaacagattgatcctgatacttttaaagaagtacagcgaatagaacagtatattaaggatcaaagtaataaagctattttagaaataataccttcgtatcgcgcaattatgttgactatcgatatcactcaaagcgatgcgacagaaatcataaacagcttggacttaggcaatgttgatgttgatgcaggactgacatcaaactcacaatttaaaattttacatatacccgtatactatggtggtgaccgtggcccagacatagaaacagtcgcgaaacataatcaattaacttcagaagaagttattaaattacatactgaaaatacctacctaatatatatgctgggctttatgccaggtttcccatttttaggagggttaaataaacaattacatacacccagaagagaggaaccgaggacaagtattcctgcgggttctgttggtattgcaaataaccaaacaggattatatccaaaatcttctccaggtggttggcaaattatcggacaaacacctatacaagtgtttgatataaatcgagatccaatgtgtttatacaactcaggagattatattaagttttatgctattaatgaacaaaccttaaatcagattgaagaggaacaaaaaagtaatcaatttgatattgaaaagtgggtgacagtaagtaatgagtattaaaatattaacgcccggtttgtttagtacaatccaagacgaagggcgaattggttatcaaaatcaagggttttcaacagctggtgcattagacatctatgcgtatagacttgcacaaacattaattaataatgaaggacctgcaatagaagttacaattatcggcccgtccattcaattttcagcagataatacctttgttataacaggtgctcagtttgacgctactattaatgatgaacctatatctcatcaaacggttattaaagcacaaaaaggcgatatattaaagttaaattcagcgttacatggtgccagaggatacatagcttttggacaacctatcaatgtacctttgatagctaatagttatgccacacacacccgtaatcaaattggcggctataaaggacgagctttaaaaaaaggtgatgtattgactattcaacaaaacgatcactatttatctcagataggtataagtgcgcgtattgaaaatgaaaacgatgaacaacacacgattcatattatagaagggccacaaatagagcagttttcagaagaagtaaaagcaaaattaacatctgaatcgtttgaaatttcagaaaaatctgaccgtatgggattccgcttacaaggcgaaaatattgcgccaaccaattctgcagatatcatttcagaaccagtagcacttggtagtattcaagtgcctaacgatggtaatcccattatcttactgaatgataagcaaactgtgggaggctatactaaaattgcaacagtttgtgcagctgatttatcgatactggcacaaaaacagccaggtgaaaccatccgattccaatggatatcagtcgaagatgcaatcaagacactaaagcaaaaagaaaaatgtttttctgaaaaaagaaaagaaataataaaaaatccaatttttgaaataaaacaacttcgaccaacagcgtcacgaatcaaaaatttattaaaaggggaattataatgaattttgaaaaaatagaacagttaattaaattagttaaagagaacgacgttaaaaaatttaaatataaagactatgaaaacgaaatcgaacttgattttactgagaatgatgcaaatcatattacatcaaaccaagcagaaaaaaatgatagtaataaaatagataatgctaaaaatgaagagaatgattcaacaaatgagcatacatatcaacaaattaaatctccaatggtaggcacatttttcttacaagacgaaaaagagttaacaaaccctattatacaagtgggtgacgaaattaaaaaaggagatacagtcggatatattgaagcgatgaaagtgcttaatgaagtaacaagcgatgtttcaggcgttgtagaagaaattttagttgagcacggttcgagcgtagaatacaatcaactgattgttaacgtaaaataagtcaaataaaggggtgtttgcattgtatcgttgtctgatagcaaatagaggagaaattgctgtacgtattataagagcgtgcagagaactaaatattgaaactgttgcaatctatgcgataggtgatgaatcaagtttgcatgtaagtttagcagatcaagctgtttgtataggtgaggcaaatccacttgaaagttatttaaaccaagacagaattattagcgcagccaaaataacacaagctaacgcgattcatccagggtatggctttttatcggagagtgcatcgtttgcccaaaaagttgaagagaacgagatttattttattggtcctactaagacaactatggaaatgatgggggataaaatcactgctagacaaacagttgataatgtcggtgttcctattattccgggttctacaagtgctgttgattcgataagtgaagtgaaatctattgctcaagatattggttatccacttgtgttaaaagcagcgagtggtggtggcggtaaaggtatacgtattatcaaagaagaagcgtcactcgaaaaagcttttaaagaagctaaaagtgagggtgaaaagtattttgatgatgaccgtatttatgttgaagctttcatccctattgcaaaacatgtggaagttcaagttatcggtgatggcaaaaataattttattcacttaggtgaaagagattgttctgtacaaaggaaaaatcaaaagttaattgaagaatcaccatgcgctgcaatttctgagtcgatgcgagaagcaatgtgtaatgatgctgttaaagtggcgcgtgcatctcattatcgcagtgcaggcaccattgaatatttagttacggatgatgcgtattactttatagaaatgaatgcacgcattcaagttgaacacacagtaacagagatgagagcaaacagagacttattacaagcacaattgtatctcatgcaacataatgaactaccattcacacaagaagacattacttttgatggtcatgtcattgaggcaagaatcaatgcagaaaatccagagaaacaatttcaacctacaccaggcactgtagaagctttacatctgccacaaggctttaatatacgtgttgatagtttgttatatcacggatataaagtttcaccatattatgattcattagttgcaaaggtgattgtgaagtcttccactagacaacttgctattaataaattaaaagtaacacttgatgaaatggtcatcgatggttttacgacaactgctgattttctgtatgctgtattatcttatcctgaatatgctgatggtgatgcaagccaagtagacattaaatttttagatagacatcaaattttaaaggaggaagtataaatgaaagtagatttgaattgtgatttaggagaagcgtttggtaactattcatttggtggtgacaatcaaattattcctttaataacatcagcaaatattgcatgtggctttcatgctggcgatcaacatgtgatgaacgataccattaaacttgcaaaagacaacggtataggtatcggcgcacacccaggacttcctgatttacaaggctttggcagaagaaatatggatttatctcctgaagaagtttatgatattgttgtttatcaattaggtgcattgaatggtttttgtagaattcatgacgttaagattaatcatgttaaaccgcatggtgcactttatcaaatgggagcaagagataaagttattgcgcatgctattgcaaaagcagtttatgactttgatccgactttaatctatgtgggactttctaatactttattaatttcagaagcacaggctttaggattgtccacagcttctgaggtttttgccgacagacgttatgaagacgatggacagttagtaagcagaaaagaagctgatgcattgattaccaatacagatgaagcgattaaacaagtgataaatatggttaaatttcaaaaagtaattacaaaaaataacaatacaatagatattaaagcagatactatttgtgtgcacggcgatggggcacatgcaattgaatttgtaacacaaattagagaacaattaacgaaagaaggcatttcaattacaaggctagggggctaagcaatgggagaaaaattaaggtcagacgaaaaagatttccagtttactaaaaatcacaaaaggttattattaggttctgtgtttttaatggcaacatccgcgataggaccagcatttttaacacaaactgctgtatttacagcacaatttgcatctagttttgcatttgcaattttactatctatattaattgatattggtgcacagattaatatttggcgtgtactcgttgttacaggtaaacgtggacaagaagtagctaatgaaatttttaatggactgggtacatttatatcaatcctcattgcaattggtggtctagcttttaatattggtaacatagccggtgctggattaggtttgaatgcgatatttgggttagatgttaaaataggtgcagcaattactgccgttctttcaattgcaatatttattagtaaaagtggacaaaagataatggacgtcgtaacaatgtttttaggtgtattgatgattatcgttgtcgcttttgttatgtttaaagccaatccaccctatgctgaggctgcaaaacatttagtgatgccagagcaaccactagcgcttgttttaccaattatcacattagttggtggtacggttggcggatacattacttttgctggcgcacatagaatattagattctggaattaaaggtaaagattatttaccatttgtaaataaggctgcgatttcaggtatattaacaactggtgtactaagaacattattattcttagctgtattaggtgtagtagtaacgggcgttacattgaatgctgataatccacctgcttctgtatttgaacatgtgttaggacctataggacgaaatattttcggtattgtactatttgcggctgcaatgtcttcagttattggctctgcatatacaagtgcaacattcttaaaaacattacataaatctgtttataataaaacgaatattattgtaattagtttcattgtagtgtcaacgttagtatttttattcttaggcaaacctgtcacgttacttattgtagcaggtgcactaaatggtttgattttacctattacattaggtacgatattaattgctagtaaacgtaaatcaatcgtaggagattacaaacacccgacatggatgctttggttcgggattgttgcagtagtcgtaacgattgtaattggtatcttctcgcttcaaggtttaactgaattatttggtagctaaatgaaaatagataataccctgacttatggttacaatacattaagttcagggtatttttcatgttaaatttttaaaataaacgaatttatgatagttaatataattaaaaagtttaaataatttcaataattattattttatgcaaaaacattgaactattatcgagctatgtgttcaaatatggtagaataacaaaggctaggattttaaaatgaggtgaaatataatgataggtattataggtgctatggaagaagaagtagctatcttaaaagataaaattgttaacttagaaataattaatgttgctcatgttgttttttataaagggcgtttacatgataaagaagttatcttgactcaaagtggtattggaaaagtaaatgttgcaatttctactactttattaataaatcgttttcacccagatttaattattaatacaggttcggcgggtgcattagacaaatcacttggtgtcggagatattatagtaagtgacatggtagcttatcacgatgcagatgcaagagcatttggttatcaattgggtcaaattcctcaaatgcctgcacaatttgttgcggatagccatttaattgaattagcaaaagaagcaataaatgatcaaaaatgggttgctaaatctggtttaattgtaagtggagatagttttattggcactgcagaacaacgcgcagatatcaaaacaaactttccacaagccatggcagcagaaatggaagcaacagcgattgcccagacatgttatcagtttaacctaccattcataattacacgtgctatttctgatttagcagatggtgatgcaggtataacattcgaagcattcttagaaaaagcagcaattgcttcaagtcaaattgttgatcgtttaattaaaactatataaaaaggtgaaataaaacatgggtatgataaagcactattttatgccaaacgaatatgtacaatctatttttcaaattgatatagaaaaactcgcaaattcaggcgtaaaaggtataattacagatttagataacacacttgtaggatgggatgtagctgatccaacagaagcagtaaaagaatggttcgatagagcaaaagaactcggcataactgtaacaattgtttcaaataacaacgaacaacgcgtaggcaatttttcaaaatcattaaatgtggactatatatttaaagcaaaaaaacccagaggtcgcgcctttaatcaagcatctaaattaatgaatttgaatccagaagaaatagttgtcattggagaccaaatgctaacagatgtgtttggcggaaatagacgcggattattcacaattatggttgtcccagtgaaaaaaacagatggatttataacgaagtttaatcgcatgattgaacgtagattactacagcattttagaaaaaaaggttatattaaatgggaggaaaattgattggcagaaactgagatattaaaatgtatcggttgtggcgcacccttacaatctgaagatttagatgcgcctggatatgttccagaaagtagtctttataaagaagacgttatttgtaaaagatgctttaggttaaaaaattacaacgaagtgcaagatgtaggcttggatagtgaagattttttaaatttacttaatggcttagcagacaaaaaaggtattgttgtaaatgttgtggatgtttttgactttgaaggatcttttattaatgcaatcaaacgcattgttggaaataaacaaatcattttagtaggtaataaactagacttattaccgaaacaaattaataaacgccgtgtaaaagaatggttgaagaaaacagcgagaaaatacggcttagatgcagaagatgtcattttaatttctgctgaaaaaaatgagggtatcgaagatttattgaatgctattaatactttgagaaataatgacgatgtctatattgtagggactacaaatgtaggtaaatctacactgattaataaattgatagagcgcagtgtgggtgaaaagaatgtagttaccacttctcgattccctggtacaactttagatatgattgatataccacttgatgacacttcgttcatgtatgatacacctggtgtgattcaagaacatcaaatgacgcattacgtaacggaaaaagaattaaaaacaattatgcctaaaaaagaggttaaacaacgtgtatatcaattaaatgaaggacaaacattatttttcggtggtttagcacgtattgattatataagtggtggtaaacgaccattagtatgttatttttcaaatgatcttaatatccatagaactaaaacggaaaatgcaaatgaattgtggcgtaatcaattaggggatgtattgtcgccccctaataacccagatcattttgatttgcaaaatgttaaagccgtacgtctagaaacaggtaaagaaaagcgtgatgttatgatttctggattaggttttattaccattgatgaaggtgctaaaatcattgttcgtgtacctaaaaatgtcgatgtcgtattacgaaattctataatgtaaggcgggtttaatgtgaagtacgcagtgataggcaatcctattgatcactctttatcaccagttatgcataatgcaaattttgcagctttaaatgatttatcatcttatgaagcgattaatattagaaacgaagactttcatcgtatcaaagagataattaatgacaaagcactttctggatttaacgttacaataccacataaagagcgtattataccctatctggatgaaatcgatgaacaatcaaaaacagttggagcagttaatacggtgaaaattgtggacggtaaatggattggttacaatacggatggtattggatatgtaacaggtttaagacaagtatatccagatttagaagatgcatatatattaattttaggcgctggtggtgcgagtaaagggctcgctaatgaactaaaaaaattcgttagacccaaacttacagtagccaatagatctatggatcgatttgaaagttggcaattagaagtgaataaaattagtttacaagaagctgaagcagcattatcagaatttgatattattatcaatacaacgccagcaggtatgaatcaaaataaagaggttattattaaccttgataatttggatagtcacacgttagtgagtgatatcgtttatgtaccatttaagacacctattttagaaattgcagaagctaaaggaaatcctattcataatggattagatatgttcgtataccaaggtgctgaaagttatagaatttggacaggtgaattaccacaaattcaaataatgaaagacactgttttaaaatatttataaaaggagattgaattatgttaacaggtaaacaaaaaagatttttacgaagtaaagcccataacgtagatccaacttttcaaatagggaaagctggtattaatgacaatatggtagcgcaaatacaagatattctagaaaatagagagttaattaaaatacatgtattgcaaaacaactttgaagataaaaatgacttagcacaatcattaagtgatgcaacacgtagtgatattgtacaagtaatcgggtcgatgattgtactttacaaagaatcacaagataataaacaaattcagttaccataatggctaaatcgattgtcttatatggtgggcaatttaacccgattcatatcgcccacatggtcgtagctagtgaagttaacgcatttataaaaccggacgtattttattttatacctagttttatatctccgctaaaagaacatacagattatttggaaggtcgatatagagttgatatgattcaatctgttatagatgatctgggttttggtcgtatctgtttaaatgaaatagaaagacgaggacaaagttatacctatgatacagtgatgtacattttagataagcatcctgatgcaaaactttatcttgtgatagggacagaccaatataatcaactgcataagtggtttaagattaatgaattaaaatcgtacattacttttgtaatcgtcaatagagataaaacgacacaagaagtcgaatcagaaatgctatcgataacaattccacgtattgatataagctcaacattaattagaaaaagagtgaagaataaagagaatattcaagcactcgtttctccaagtgttgaacaatatatccgagaggaaggattatatgaaagttaatgaagcaatagaaattgtcaaagagaaattgcctgaaaagcggtttaaccattcattaagagtggctgaaactgcggttaaattagcagatatttatgatggtgataaagataaagcagaacttgcgggtgtattacacgattattctaaatatgatgatttaggaacgatgtatcaagttgttacgcaacatgatttagatagcaatctattaagttatggttcggaaattttacacggacctgtttgtgcggttattatgaaagagaagtatggtatcgatgatgaagaagtattattagcgataaaaaaccatacgacaggtcgtgctcaaatgacaaaaacagagaaacttgtctttattgcagactatatagaacctgggcgtcaaaccccaggcgttgaagaaattagagatttagcatacaataaaggtggcttagataaaacaatatatgaaatatctaagcgtaccgttttatatttaattaataaagatattaatgtctatgacgcgacgattgcatgcttgaattattacaattacagtgacgaaagagtaaaggatgattaaatgaaatcagatcaattattaaaattagctgtggaagcaactgagaataaaaaagcagaagatattatttctttaaatatgcaaggtattagtgatatggcagactattttgtggtttgccacggaaataatgaaaaacaagttcagtctatcgcacgtgcagtcaaagatgcagctaatgaagcggaaattgaagttaaacgaatggaaggctttaatgatgcgagatggattcttattgatttggcaaatgtagtcgtacacgtattccataaagatgaaagagattattataatattgaaaaactgtatagagatgcacctcttgaatcatacagacaggctgtttattaaaaatggcacaatatgaagaaatgagcttgttttatgatcagctaaccttagatcaaccgtatgaagattggctaagcattgttaatcattttgcaggtaaaaagcattctattttagatattggttgtggaaccggtagtttaacatcgctgttcactgaatttgagcaagtgacaggaatggatcttagtgttgatatgttagctatagctgctcaaaaatctaatgttgttatttggattgaagcagatatgactgattttgagcttgaacaacattttgatgtcattacaatattttgtgattctttgaattatttacctgaaagagaaaatgtttcagatacatttaaaaatgtttatcgacatttatctcaagatggtgtctttatgtttgatgttcacacagcttataaaatgaatacattgtttaataatcaaagttatattgacgaatccgaagatgttttcttagggtgggaagctgtccaaggcgaagaacctctgagtgtttggcacgatatgtcgttttttattaaacaagatagtacgcattatactaggtttgatgaatcacattatcagcaaacttatactgaaaatgaatatacagcgatgttaaaagaagtaggttttaaccatatacagacttttgttgactttgacataaacaatcacactgaaaatggttatagattatttttcatagctaaaaaataaaagtaaaatcactcccttatacgtgttaagtataaaggagtgattttttgcaattagactggtcaaaatggaaagtaatttttgagaaaaataaattagtgatcatagttggatgcgcgttagtactattgcttgctatttgttgttataaatttttaaatgtcagcaatacagatgacaacagcaatgcaaacttaagtacaaatgatgattccacattaattaatgaacaaagtaccaatagtaaaacaattgctactaataatgataatgcaaaatcagtaaaaaatgataaaaagggtagctttatttttgttgatattaaaggtgctgtacagcatcctgatatttataagatgaaagatacggatagggttaagcaattagtggacaaagcaattttattaaaagatgctgatctttcaagtgtgaatttagctgaaaaattacaagaccagaaagtcatttatattccgaaaattggtgacaaagatcaaaaagacattaatatgaatcattttgctttaaagaataaccacacagaagatagtaaaaaaggtaatagtacaataaactcagaacaaataaatattaatgatgcaacagaatctcagttattaacgataaatgggattggaccgactaaagctaaggctattatagaatatagacaacaacatggcccttttgagtctgtagagcaattaaaagacgtaaatggtattggagctaagactttagaaaaaatcggttcaaagctgactatataacttttagttgcattatggttcaattcaaattaatctataattaatcaaaaaatataatacatatatggaggtaaatcatcatggatcgtatcaaatgggaagaatactttatggctcaaagtcatcttttggctttgcgttctacgtgtgaacgtttgtcagttggtgctactatagtgaaagataatagaatcattgcagggggctataacggttcggtttcaggtgaagttcattgtattgatgaagggtgtttattagaggatggccattgtatcagaacaatacacgctgagatgaacgctttacttcaatgtgctaaacaaggtgtttctacagatggcgctacaatctatgttactcatttcccttgtttgaactgtacaaaatcaatcatacaatctggtattgatacaatatattatgccgaagattatcataaccatacatatgcattggagttattgaaacaagcaggtattgagtataaaaaaatttcatttgatcaagagcatgtagcacaatacttattaaataaatagccacggtttattatggcatagcatatttagttggcattctttggctacatctcaaatttctttcaatacttctttttatattccttatatttttacttaaaataaagcagttcaaatggcagcaagttattatgattataattgttccttttatagcttttggattattttataggtattatcatcaaacgttagaatttcaaaatgatatgttaagtaaatctttaattgctaatgcaaaatttatcactaaacctgtcattagcgacaatactctaagtggtaaactccaaattgatagcgattattatcaatattattttaagccgaacagaaaagttaaatcttcggattcgtctgaattataccgacgcgattgtaaaatccatggtgcttttaaatttaatggggaaggaataagtagaaaattatatatcaatataaaaagcttcgatttatcaagttgtaagtcaatatcaatgggttggatgtctctggtcgatttacataagcaatatatttataagcgtcttgttacagaacacaacgatgatccaggtaaaataattgcattgattacgggagatacttccaagataaaagaccatcaattagatcaaattagagaaattggtatttatcatttactagcaataagtgggacacatatcacagctttagttagtattattttttatactttgactaaagtcagatgtcccttatttttgataaaagctattatttttattttgttacccatttatactatttacactggtatggctccaagtgctattcgtgcagtgttagttgcgcttattcttctattacttccgaaaaagttgtacaaacattctatgaatgttctttttggtgtttttattttaatcacactaatttctccacaattaatatataatattggatttcagttttcattttttataactttttgtattctttttgcactcccgattttaaaagacgctaatatcgtcaaaagcatgatttttgtcagtgttatagcacaactttcatcttccattattagtgcagcccattttaatcaaatccaatggataggtatcttagctaatttattctttgttccgttttacacatttattttatttcctgcctcgttaatttattttgcttcgcttcattttcctattaaagttacaatttttacaaaatgcctaaatatattgctcttgattcatgattactttgtttctatttttatgaaattctctactttaaaatggttcacccccgaattatcttcattttttattgcaattgctgtgtttcttatcattgttgcacttattttattcgttcataagcattattttctttttttattgattctaataagcatatttttcattttaaccattttaccgaaatcaaatgattacagattaactatgttaaacgtgaaccaaggagatgctatattatttgaaacggataaacaggaatctatgcttatagatactgggggtgtattgattaaaaaaggtatgaaagacaaccacatgctatcaaaacgaaagattctgcccactttaaaaaagcatggtttacctaaaattaattatttgattattacacacccacatgttgatcatatgggagaattaagctatctaataggaaaatatcaaatagatcatataataataaatgcaaatagctttagcttggaacaattaaaagcgctaacgttacaatgtaaaaaacataaggttaaattattagattttaaaacttttaatcatatcgtacttagcaaagcagatattcgtttgttagatgctacaatacaaaattcagacgatctaaatgaacattctattattacctacatacaatataataaatataaaatgttatttatgggcgatgcttcaaaacataatgaatctcttttacttaataagtacaaacttaataatttggatgtattaaaagtaggtcatcatggaagtaaaacaagttctagttctaactttgtcaatataatgcatcctaaaatcagcttaatttcagttggacaaaataatagatataaattacctagtaccgaagttattactagattgaaagcaataggatctaaaatatatatgacaagtctctctggggaagtcacaattactttatcaaattcgatacaaattaaatcacaatttggtaaatgatttgggtagagagaacaaatactgcgtgatataataatttaatgtgtaatagagatgaaagggtgctatatatgagcaataatataataacaatttacggagaagtacctgaacttatagaaaaaaagtcagcagaagaaataaataactatttaaatgcacctaaagatgattttaatttcgtaaaatataatttatacgaacatgatttggcacccgtaatagaagaatcattgaccatgccttttttctctgataaaaaagtagtacttgttcaaaatgcatacctattcactggtgaaaaacctcctaaagatttgaatcataacatagatcaactcattgaatttattgaaaaatatgatggagatacgttgattatttttgaggtatatcatagtaaattagatgagcgtaagaaattggtgaaaacattaaaaaagaatgcccaattaaaaaaaatagagcaaatgtcagaagaagaaattatgcagtggatgaaaaaagagcttcatgaaaattttaaagatatcaaacaagatgcacttgacctatttatagaattaacaggcgttaattttaatattgttaaacaagaactcgaaaaattaatccttttcttaggtgacagatcaacaattaataaacaagatgtgtaccaaattgttaatagaagtttagaacaaaatgtgtttttactaacagattatattcaaaaaaataaaaaatcaaatgcaattcaattggttaatgatctgattgcaatgaaagaagaaccaattaagttattagcattaattaccagtaattatcgacttttttatcagtctaaaatattaagtcaaaagggttatagtggtcaacaaattgccaagacaataaatgtacacccatacagagtaaaattagcgcttaatcaagcaagaaactaccaacttgaaaatttgctaaatattatagattcctgtgctgagacggattataaattaaaatcatcttatatggataaacatctcatattagagttatttattttatcgctgtagttttaaacaaagcaatattatcccgctgtgcatacattaaattgggagtattttaaaaggatacttatttaaaaaaagatataaaaaaagttcaagcaattgcttgaactttaatattatttagcagctgtcattaatgatgacttaatacgagcagctttgttgtcgtggattaagttgcgttgtgcagctttatctacttttttcaaagcaaaactcaataagtcagctttgttatcagcatttgattctaaagctgaatgagctcttttaactgctgtacgcatttcatttttttgagaaatattacgttcttcagcagtatgtgttgtattaacacgtttaattgcagatttgatgtttggcatgtgtgtcacctcctaaaagtgatcttcgctatcaaaatgaatttgattacaacaagaaatattttatcaaaacaagcgactttctgcaatcatttatttatgagccgcccgtaaattcaatataaatgatataataatgtataaagttatgaaacacttattctataaaatattctgataaagtgttaacaagtgaattaatattttgaattattataaactaatggctttgcaagtttgcaattaacttgtaaaaacgttattatatcaaagaatgtcatacatacaaacgggctagaattatgaaagtgagaaggataatacatggataaacaagatcgttataatcgacgcaaaaatataagaaacttttctattatcgcacatatagaccatggtaaatctactttagctgatagaattttagaaaatactaaatcagttgaaacaagagacatgcaatcacagttgctagattctatggatttagagagagaacgcggtattactataaaactaaacgcagtacgattgaaatacgaagcgaaggatggagaaacatacacgttccatttgattgatacaccaggacacgtagattttacatatgaagtatctagatcacttgcagcgtgtgagggtgctattttagtagtggacgcagcacaaggtattgaggcacaaacactagctaatgtctatttagcactggataatgatttagagcttctacctgttatcaataaaattgatttgcctgcagctgagccagaacgcgttaaacaagaacttgaagacgttattggtattgataaagaggatgtcgtacttgcaagtgcaaaatcaaacataggtattgaagatatattggaaaaaatagttgaggtagtaccaccacctgaaggtgatccagaagcacctttaaaagctttaatatttgattctgagtatgatccatatagaggtgtcatttcatccatacgtgttatggaaggcgttgttaaagctggagatcgtatcaaaatgatggctactggaaaagaatttgaagtaactgaagtaggtattaacaccccaaaacaattatcagtagatgaattaacagtgggtgatgtaggttatatcattgctagtattaaaaatgttgatgattcccgtgtaggtgatacaatcacgcatgcagagagacctgctgaagcgccactacaaggttataaaaaaatgaatccaatggtattctgtggattattccctattgataacaaagactataacgatttaagagaagctttagagaagctgcaattaaacgatgcctcattagaatttgaaccagaatcttctcaagcattaggttttggctaccgtactggttttttaggtatgttacacatggaaattattcaagaaagaattgaacgtgaattcggcattgaattaatcgcaactgcgccatcggtaatttaccaatgtatattaaaatctggtgaggaagtatctgtagataatccagcgaatatgccagatcgcgataaaatagaaaccatttatgagccgtttgtacgtgcgactatgatggtaccaaatgattatgtcggtgctgtaatggaattgtgtcaacgtaaacgtggtcaatttattaatatggaatacatggatgatattcgagtgaatattatttatgaaattccattatcagaagtagtatttgatttcttcgatcaattaaaatctaatactaaaggctatgcttcttttgattatgaatttattgataataaagaaagtgacctggttaagatggatattttattaaatggtgaaaaagtcgatgctcttagctttatcgtgcataaagaatttgcatacgaacgtggtaaaactcttgtcgataagttgaaaacattaataccaagacaacaatttgaagtaccagtacaagctgctgtaggacaaaaaattgtcgcgagaacaaacattaaatctatggggaaaaatgtattgtctaaatgttatggcggagacattacacgtaagagaaaattattagaaaaacaaaaagcgggtaaagccaaaatgaaagcagtgggaaatgtagaaattccacaagatgctttccttgcagtactcaaaatggatgaagattaataatactttaaacttggggccttaaatccgaacgatttatgccccagttttttatgaaacatcatgtttttaaatagggaagtaggtgaacacaatatggaagtgaaaagtgcatatatacatatccccttctgtgtaagaatatgtacgtattgtgatttcaataaatattttattcataaccaaccagttgatgaatacttagattgtttaattaaagaaatgcaatatagtaaaacgaaggtgttagaaactgtttttgttggtggaggaacgccaacggcacttagttatgaacaacttaaacgtttacttaaagctattactgatattttcgaaatcaaaggagaatttagttttgaagcaaatccagatgaattgactttggaaaaagttcaattattaaaggattttggtgtgaatagattatctatgggcgttcaaacttttaaaccagagctgcttgaaatattaggaagaacacataatacatctgatatataccaagcagttacaaatgcgagagccgtaggtattccttctattagtttagatttaatgtatcacttaccaaaacagaccatcgatgattttaaagatagtttagaaaaagcattggcgatggatattgatcatatttctagttatggtcttattttagaacctaaaactcaattttataatatgtataaaaaaggcaaattgaaaatacctaatgaagatatcggggaagaaatgtatgaatatcttttagaacgcatgcaaaggtctgagttacatcaatatgagatttctaattttggaaaaatgggtcacgaatcagagcataataaagtttattggaaaaatgaaggttactatggctttggcgcaggtgcaagcggctatgttgacggtgaaaggtacagtaacgttaatcctgtaaatcactatataaagaaaataaagaacaatgaaagacctttgttagagtccacgagaccaacaaaaaatgaacaaatggaagaagaaatgtttttaggtttaagaatgaaccaaggtgtcaataaagctagatttaaagaaaagtttgatttatctatagatgaagtatatggcacaacaattgaggatttacttaaaagagaacttattgtagataaccaaggctttatttcaatgactgagagagggaaagtcatcggaaaccttgtatttgagtcttttttactaaatgtataagtttttattaaaaaccgaggctttaacattgacttactttgaccaatttgataaattataattagcacttgaaacaaaagagtgctaatgaggtgaaaacatgattagtgatagacaattaagcatattaaatgcaattgttgaagattatgtagatttaggtcagccaattggttctaaaacactgattgaacgacataaattaaatgttagccctgctactattagaaatgagatgaaacaattagaagatctcgaactaatagaaaaaacacatacttcatcaggaagatatccatcagaatcaggtatcagatattatgtgaatcaattattacaagaaacatctcatcaacaacaaactaaaatgcagcgtttaaaagatttggtaattgaaaatcattatgacctttcctctacattgagtgattttgctaatgaactttcaattgcatcacaatatacaacgctggtaatgcgtccaaatcataaacaagatataatcaataatattcatttgattagagcaaatgcttatttggttattatggtggttgtgtttacatcaggtcatgttgaacatttacatttagcatctgaagtaccattatctaatgacgaattaaccaaaatatcaaattttgttactgctaaatataatgaatggaataaccaccgttttgaaaatgaattaaatgcttttgtaaaatctgatactgaaaaagattttataaaagacatgctaaatatgattgatattcattttgataatcaaagtaatggcatttttatgggcggaaaggttaaactcatagatgcgttgaatgaatcaaacgtatcatctattcaaccgattctacagtatatagaatcgaacaaaatcacacaactacttgatgaaatgtccaatacttccatcaatgtgaaaattggacatgaaattgaatcaagtttaagtgatatttctatcgtaacaagtgagtatcatattgatgataggctgaaaggtcaaattgcggttatcggaccaacagcaatgaattatcagaacgtaattcgattactaaatacgatttggtaattaagaattgtattggagggcagactatgacagagcaaaacgaatcagctttcaacgaaaatgaagaagttaatgaagaaacttcacaaaccgattcagttgaaaacaatgatgaaactacagaaacatcacaagataatctgcaggaggacgattcacaagaaattgcagaagacgtagatcctaaagatgaagaaattcaacaattaaaaaaagatgttcaagaaaatgaagaaaaatatttaagattatacgctgagtttgaaaactataaacgtagaattcaaaaagaaaatcaaacaatgaaagcatataaagcacaagatgtactaaatgatattttaccaacaatagataacattgaacgtgctttacaaatagatggcgaagatgaacaatttaaatcacttaaaaaaggtgtagaaatggttcatgaaagtctattaaatgcattaaaaaataatggtttagaaaaaattgagacagaaggtcaacaatttgatccgaatgtacatcaagcagtagttcaagatgacaatcctgatttcgaatcaggtcaaatcactcaagaactacaaagtggatacaaattgaaagaaagagttttaagaccttcaatggttaaagtaaatcaataattcgttttattgttgaaaacaccaaatttttaaatatatcaggaggaatttatttatgagtaaagtaataggtattgacttaggtacaacaaattcatgtattgcaattttagaaggcgatgagccaaaagtaattcaaaaccctgaaggcgctagaactacaccatctgtagtagcattcaaaaatgatgaaactcaagtaggtgaagttgcaaaacgccaagcaattactaacccaaatacaatacaatctatcaaacgtcacatgggtactgattataaagttgatgttgatggaaaatcatatacaccacaagaaatttcagcaatggttttacaaaatcttaaaagtacagctgaagattatttaggtgaaagtgtagataaagcagtcattactgttccagcttatttcaatgatagtgaacgtcaagctactaaagatgctggtaaaattgctggcttagaagttgaacgtattattaatgagccaacagcagctgctttagcatatggtttagacaaaactgaacaagatcaaaaagtacttgtattcgacttaggtggcggtacttttgacgtatcaatccttgaattaggtgacggtgtatttgaagtgctttctacagcaggtgacaacaaacttggtggggatgactttgaccaagtaattattgatcacttagttgcagaattcaaaaaagaaaacagtgtagatttatctaaagacaaaatggcgttacaacgtcttaaagacgctgcagaaaaagctaaaaaagatttatctggtgtatctcaaacacaaatttcattaccatttatctctgcaggagagaatggtccattacacttagaattaactttaactcgttctaaatttgaagagttagcagattcattaatcagaagaactatggaacctacgcgtcaagcaatgaaagatgctggtttatcaagttctgacattgacgaagttatcttagttggtggttctactagaatcccagcagttcaagaagctgttaaaaaagaagttggaaaagatcctcataaaggtgtgaacccagatgaagtagttgcaatgggcgcagcaattcaaggtggcgttatcactggtgatgttaaagatgtcgtattattagacgtaacaccattatcattaggtattgaaattatgggtggacgtatgaatacgcttatcgaaagaaatactacaatcccaacatctaaatctcaagtttattcaacagcagcagacaaccaacctgcagttgatatccatgtattacaaggtgaacgcccaatggctgcagataacaaaacacttggtagattccaattaactgatattccagcagctccacgtggcgtacctcaaattgaagtgacatttgatatcgacaaaaacggtattgtgaacgttactgcaaaagatttaggtacaaacaaagaacaaaatattacaattcaatctagctctgcactttcagacgacgaaattgatcgtatggttaaagacgctgaagaaaatgctgaagcagataaaaaacgtcgcgaagaaagtgacttgagaaacgaagcagatagcttagtattccaagttgaaaaaacaattactgatttaggtgaaaacatcagcgaagaagataaacaaaatgctgaagacaaaaaagaagcacttaaatcagcactagaaggcgaagatattgatgatatcaaagctaaaaaagaagacttagaaaaagtagttcaagacttgtctacaaaagtttatgaacaagcagctcaagctcaacaacaagctcaaggtgaagatgcaaatgcttctcaagatagtaatgttgaagacgctgatttcaaagaagttaaagatgatgacaaccaagataaccaaaaataagtcgagtcattgactaaataattgttattaacagaaatatatgacacaattgcttagccaaattaagtcaaagtcaattgaacattggctttgactttttcctttttataatagatttaataaaaccgtgaaaggagaggtatgagtggccaaaagagattattatgaagttttaggtgttagcaaaagcgcttctaaagatgaaattaaaaaggcttatcgtaaattatcaaaacaataccatccagatataaataaagaagagggtgctgatgagaagtttaaagaaatctcagaagcatatgaagtattaagtgacgaaaataaacgtgcaaattatgaccaattcggacacgatggaccacaaggtggctttggcggccaaggattcggtggccaagactttagtggattcggcggtggcggattcgaagatatctttagttcattctttggtggtggcagacagcaacgagatccaaatgccccaagaaaaggtgacgatttacaatatacgatgactgtcacatttgatgaagctgtttttggtagcgaaaaagaaatttctattcgcaaagatgttgcttgtcacacatgtgatggtgaaggtgctaaaccaggaactaagaaaaaaacttgtcattactgtaatggttctggtcatgtttcagttgaacaaaatactattcttggtagagtaagaactgaaaaagtatgtccagtatgtagtggttcaggccaagaatttgaagaaccttgtccaacttgtcatggtaaaggtactgaaaataaaaatgttaaaattagtgtgacgattcctgaaggtgtagacaatgaacaacaaattagattagctggtgaaggtgctccaggagaaaacggtgggcctcaaggtgatttatatattgtgtttagagtcaaaccatctgaaaaatttgaaagagacggcgatgatatttactattcattagatatcagtattgctcaagccactttaggtgatgaagttaaagtaccaacgcttaaaggtagtgtcatgctaacaatccctgccggtacacaaactgaaaaacaattccgtctgaaagaaaaaggcattaaaaatgttcatggttacggttatggcgatttatttattaacatcaatgtagttacgcctacaaaaattagcgatcgccaaaaagaattacttagagaatttgctgaaatagatggcgaggagctttctgagcagccatcaaattttagagataaagcaaaaagattcttcaaaggagaataacttatgaactggactgaagttgcaatcgttgctaaccatgaggtatcaccaatcataaccaatttactcgaagattatggctctaatggtgttgttatagaagattcagaagatttaacacatgatttcgaagataagtatggtgaaatatatgcattaaatgcagaagattatcctacacaaggtgtgagagttaaagcatattttaacgaaattaagtatacaaaagattttcaagaaaaattaattcaatcattaaaagacattgaaagtcttgatttagatttgtttagctttgatgagcaaacaattagagagcaagattgggagaatgagtggaagcattactttcatccatttcgcgcatctgaaaaattcacaattgttccgagttgggaaacataccaacaggaagatgatagtgaattatgcattgagttagatccaggtatggcatttggaacaggtgatcatccgacaacgagtatgtgtctaaaagcaattgaagcatatgttaagtctagtgattcagttatagatgtcggcacaggctcaggtatactgagcattgcagcacatttgttaggcgttaaacgtataaaagcacttgatgtagatgaaatggctgttagagtagctaaagaaaactttcaaaaaaacaactgtgaatatgctattgaagcagtcccaggtaatttattaaaagaagaaactgaaaaatttgatgttgttatcgctaatattttagctcatattattgaagaaatgatagatgatgcttataatacacttaataaagacggttattttataacttctggtattatagaagaaaaacacgaggctattgttgaacatatgaaacgcagtggatttgaaatagtttctattaaccatgacaatagttgggtttgtatcgtcggacagaaagtgagcgattgacatgcaaagatattttatagatcaaaacgctgatgtaaatcagcgtttttgtataactgatcaaggtgatatacatcatatttcaaacgtcatgagacatcaagttgatgattatatcattattacatttgctgatcattatgtttataaatgtaaacttgttaatattggtgcagaaggtatcatggtttcgttagaagaacgtattgatgtggatacagaattaccacaaaatgtaacgatatgtagtggactaatcaagtctgacaaatatgaatggatgctacaaaagtcaacggaattaggtgcaagtgaatttattgctgtaggtatgaaacgttctgttgtcaagcttacagaaaataaaattgcaaagaaattagagcgttggcagaagattatcaaagaagctgcagaacaaagttatagattagctattccaacgattcaatatcaagcaacattaaacgatgtacttaaaagtaccaaaacgtatgattatattctaattgcctatgaggatgccgctaaaagtggtgaagtaagtcaatttaaatcgttagttcaacaatttaaaccaaatgataaagtattaattatatttggacctgaaggtggccttgatgaggatgaagtctcactgttacaagatgttggttaccaaattggcttaggtcctagaattttaagggctgaaacagcacctttatatgttttaagtgctttgagtttcgaaaaggatttacacaattagtttaatgtattgatgtgtgctaatagcgtgttatatgaattataaagaataagatgatacaacgataaaaatccataaccggataaatttaatcatgtattaatagaatttattcaaaataacaaaatctgaattttagtaattgaccacattaatcagatatattatactagattatacatggttcataccgtgtattgataataaagtttcgttgatatttggagggagggaaatacacatgtctaaaacagtagtcaaaaagaacgaatcacttgaagatgcgttacgtcgtttcaaacgtacagtttctaaaagcggtactattcaagaagtacgtaaacgtgaattttacgaaaaacctagcgttaaacgtaaaaagaaatcagaagctgcacgtaaacgtaaattcaaataattaatagtttcgttgactccctcaacaccaacattaattataaaccataatagccttagttgttatatacagctaaggctattatttttttataaaaaaccattgtactttttaaatcaacatattttttattatacatagcatgtagtacttaaccattattaaagcaaaaagtaataatgaaaatttctttgaagataatagttttttatagtgtaaacggtataatcgcatattagtttcatgtataatcaaattgagagcgaggtgatagagtgattctttcaagtagtttacatacaatttttccttccaatttagtcgaggatggaaattggattgataatatagctaactttatagtacatccaattggcgctttgattttaacatgtattatctttcttggttttctatatcaattatattctaataagattaatgttgttggtatcatatcaacgatagcgttattgatatttttcttaggattttttgtgaaaggcgacgttaatttctattctgtgatactttttggagtaggagtcatattagttatcattgaattatttgttgtcggtgcggttattggcatcattggtatgggttttattattttcagtattattactttaggagacaatttaatcttcatgattgctaatgttgtctttgcattaatcttatctattattgagtgggtgatacttgtgaaaggatttaaacgcaaaattccatttttagacaaagttgtactgaaagattctacaaatgcagaggcaggttacacttcacatgaagatcgctctcatttagttggaaaaactgcaacaacatcaacggacttaagaccagcagggattattacattaaataatgaaagaatcgatgctgtttcagatggttcatttattttaaggaataaacaggttaccatcttagaagttgaaggtacacgtgttgttgtaagagaaatcgaatcataaaggagagaaagtatgatcggattaattataatcgtcgttattgtattagtagcattgttgttgctattttcatttgttccagtaggattatggatttcagcaattgctgctggtgttaaagtaggcatcggtactttagtaggtatgagattacgtagagtatctccacgtaaagtgatttcaccgctaattaaagcgcacaaagctggattgcatttaactacaaatcaacttgaatcgcattatttagctggaggtaatgttgatcgcgttgttgatgctaatattgcagcgcaaagagctgatatcaacttaccattcgaacgtggggctgctatagatttagcgggtcgtgacgtattagaagctgtacaaatgtcagttaatcctaaagtcattgaaacaccatttattgctggtgtagcaatgaatggtatcgaagttaaagcaaaagcacgtattacagttcgtgccaacattgctcgcttagttggtggtgcaggtgaagaaacaattatcgcacgtgttggtgaaggtattgtttcaacaataggttcaagtgaacaccatacacaagttcttgaaaatccagataatatttctaaaactgttttaagtaaaggattagattctggtacagcatttgaaattttatcaattgatattgctgatgttgatattagcaaaaatattggtgcagatttacaaactgaacaagcgcttgcagacaagaatattgcacaagctaaagcagaagaacgtcgtgcgatggctgtagctcaagaacaagaaatgaaagcaaaagtacaagaaatgcgttctaaagtggttgaagcagaagcagaagtaccattggctatggctgaagctttacgttctggcaacttaggcgtaaaagattattacaatttaaaaaatgttgaagctgacacaggcatgagaaattctattaatcaacgtacgaatcaaaaagatgatgaatcaccggataaataattaggggtgattaaatgagtataggtattattatctttgtaatatctgtgattgtgacaataattggtgctattagtgataatagccataaagaaagacaaaaccaaaaaccaccagtcaacaaacggtcaaatgaccatggaggagaaccacagaaacgtggcttttttgatgaaataggaaaaacatttaaagaaatagagaaacaattaaatgaagaccctatgtcgcaagaacgtgaaaaaccacgcgctcctcaacctactaagacacaagcagaaccggttgaaacacgtgcagaaaaaatggaaacaccgagtcctgagcgctcatcaagaacgatgagaacggataatgaaactgaagctgaaaaagcaaaacgttcacaacaacagcaagatgataaattacaacaagaattagaatccgatttaataggacaaatgcaagatgtacgtagtgaaattgatcgcgaaactgagaagaagttgcaacgaactgaacgaaaagcacgtgcaattatagctgataaatatttatcagaaagaacaaagcgttttcgtttaaaacaacttatgaatgctcatgcgatacaaggaacagccacaaatgaacaattcaggtttgctgaggacgaagttgttaatggtattatttggtcagaagtattagaaagaccgaaacaattataatataatgttttaagttaacgccttataaatcaatgtaatttgatgttataaggcgtttttaatattataatcgtagtaagaacttttatttatctgattatcacaatcatatttatacattataaagctttcgttttattataaaattagatagaatgtaaatcttctgttaaaattaatgaaattctgtcctattcaattcactttaaaataatatattgagtattcgtgatataatagagatgtataatcaatagttttaaacagtaattgtatatttttatacaagctgattatttatttgttaacaatcattttgtaacttaaaatctaataggataaaataaaagaaacgaatatacttgtaaaggagcacctatatgcctggaattattcaaataaatgacatcaatgaagcgcaagcactcattggtaataatgatgaacaccttaaatcaattgaggaaggatttgatgtcattatacatgctcgtggtcaagaaattgctgtaaaaggagagcaagttgagcatgttgaaaaagcggaatccgtactaattaatttattaaaagtcatacaacaaggtgtaacaatatcgattaaagatgttgaagcagcagtgaaaatggcacaaaacggtacgattcaatacttattagatttatatgaagatgaaattactaaagatgcatttggcaagacgattcgtgctaaaacaatgggacaacgtttatacgtaaatgcgatgcaccataatgatttagtttttggtgtgggaccagctggtacaggtaaaacatttttagctgtagtctatgctgctaaacagttacgtaaagggtcagtaaaacgcattgttttgacaagacctgcagttgaagctggcgaatctttaggatttctaccaggagatttaaaagaaaaagtagatccttatctaagaccgctttatgacgggttaaatactgttttaggtagagaacaaactgctagatttatagaaagaggtatcattgaagttgccccattagcttatatgagaggtagaacattagatgatgcgtttgtcattttagatgaagctcaaaatactacacatgcacaaatgaaaatgttcttaactagattaggatttggatcaaaaatggtagtcactggtgacaaaacacaagtagatttaccaaaaggtgtaaagagtggtttgaaagaagcgattaaaaaattagaaaacgttaaaggtttaagtattcatcatttagaccaaacagatgtggtacgtcatccattagtaagtaaaattattgatcgttatgagggagatgaataaatgtttacgatagattttagtgaccatactaatttagtgaaagaggattggtttacacaaattgacaagctgctaacgtttgcaaaggaacaagaaaatatcgaagaagaggctgaattgtcagttacttttgtagataaagatgagattcaagaaattaataaaatgtatcgagataaagacaaagtcacagatgttatatcttttgcattagaggaagatgaacctgaaataactggtatagaaatgccgagagttttaggcgatattattatttgtactgatgttgctcaagaacaagcagactcgtacggacattcatttgaaagagaattgggcttccttgcattacacggctttttacatttattaggttatgatcatatgaatgagcaagatgagaaacaaatgttcggacgccaagatcaaattcttaatgcatacggcttaactagagattagaggcgcgtatggatagatttaaatatgcatttcaaggcatgatagttttattaaaaaaagataagaatttcttacttcatcttatttttggtttgatagtcattgtttgtggatttatatttcatattacaaaagtggaatggctttttatattgttagcgattggacttgtgctagcatttgaaacgataaacacagctattgaatatgtagtcgatttggtaacaacggattatcatattttagctaagaaagcgaaagacgttgctgcttttagcgtgattattgcggctattatagctgtcttaattgggctgattgtttttttaccgtatatttttaaataatagtgcaaattcacaaaagttgtttatacttaatgaataaagcttttaataaaatatagttatacacccatttccatggtgttgaatattgaacaggagagatgaagcaatggcataccaaccacattatttttcagaagtaagaaaagcacaggcaaatgcgtacgcaccctacagtaattttaaagttggtgcgtatttaagaacgaaagatggcaaagcttattacggtggtaatgttgaaaatgcagcttatccaatggcgatttgtgctgaaagatcaagtttagttgcggcaattgctgatggataccgccccaggagatttgaatcaattactgtaactgtagatgcagatgaaccgtcctcaccatgtggcgcatgtcgacaagtaatgaaagagctttgtgatgacgaaatgccagtttatatgaccaatcataaaggtgatatgacagaattatcagtaggcgagttattgcctttaggattttcaggaaaggatttaaattaatgacagaacacaaatcaggctttatatctatcattggtagacccaatgttggtaaatcaacctttgtaaatcgtgtaataggacataagattgcgataatgtccgataaagcacaaacaactagaaacaaaattcaaggtgtcatgacacaagaagatgcgcaaattattttcctagatacaccaggtattcataaacctaagcacaaattaggagattatatgatgcgcgttgcgacgaatacactatctgaaatagatgccattatgtttatggtaaacgtcaatgaggatattggtagaggcgacgaatatattatggatatgctaaaaacaatcaaaacgccagtatttttagtgttaaataagattgacttggttcatcccgatgaattaatgcctagaattgaaaaatataaaaaatatatggattttacagaaatcgtacctatttctgcacttgaaggcttaaatgtagatcattttattaatgttataaaatcatatttaccagaaggccctaaatattatcctgatgatcaaatatcagatcatccagaacaatttgttgttggagaactgataagagagaaaattttacatttaacaagtgaagaaattcctcatgcgattggtgttaatgtagaccgtatgattaaagaagatgaagatagagtgagaattgaagctactatttacgtagaaagagattctcaaaaagggattgtcattggtaaaggcggtaaaaaattaaaagaggttggtaaacgtgcgcgtcaagatatagagcgtttattaggctcgaaagtttacttggaactatgggttaaagtacaaaaagactggcgaaataaagttaatttcattcgccaaatgggttatttagaagatagagattaagttaaagttgaaagtcggtgaattcgtgtgttaatcaaacaaaaagggattattataaaaaccattgattatggcgaatccgataaaattataactatcttaaatgaatatggtgctaaagtcccacttatggtaagaagagccaagaaaagtaagagcggcttgcaggctaatacgcaattatttgtgtatggcttgtttatttattcaaagtggaaaggtatgggcaccttaagttcagttgatgtcattgaccaaaattaccatctgcgactagatatatatgaaagtagctatgcaagtttgtgtactgaaacgatcgaccgttccatggaaacagatgaaatctctaaaaatagttacgaattattgcattttgtattagataagattaggcaggggatttcagcacaactcatgtcagttgttgtattgttaaaatgtatgacaaaatttggatttaatgcagtatttgacagatgtgtgataactcaaagtgaagatcaatcaaaattagtcggttatagttttaaatatgatggtgcaatttctgaaaatgttgcatataaagatacacacgcatttcagttatcaaacaaaacgttgtatttattagatatccttcagaagttaccaattaatcaaatgagttcattgagcatacacgaaacaattgtcgatgaaatgtcagaacttgttatcttattgtataaagagtatgcgggtatgtatttcaaaagtcaaaaactaattaatcaattatatcgattagataacttataataattatttatattcaaacctattggcccagaccataggtttgttttttttatataaaaaaatgggacaagaaaaattaatccattacaatgaaataatcttagtttcttgtcccataaatatttaaattgctatttaagttttatttgattttgaatatatcattcttaaaattaaaatttaactttttcagctaagaatgattttaattcagtgattggcatacgaacttgctccattgtatcacggtcacgaactgtaaccttttcatcttctaaagaatcaaaatcaaaagtgatacagtatggtgttccaatttcatcttgacgacggtaacgtttaccaattgattgtgattcatcaaaatcaattgcaaaatcagcgcttaattcttcgaacactttaattgcatcgcctgataattttttacttaatggtaatacagctgctttatatggtgcaagtgcagggtggaagtgaagtactgttcttgaatctttgcttccttcgactccttcttcatcataagcatcacataaaaatgctaaagtaacacggtcagcacctaatgaaggctctatacagtaagggatatatttttctcctgtttcttgatcgtgatattggaaatcttcaccagaatgttcactatgttttttcaagtcaaaatccgtacgactcgcgataccccaaagttcaccccaaccaaatgggaaacgatattcgatatcagtagtcgcatttgaatagtgagacaattcatctgcatcgtgatcacgtaaacgcgttgcttcttcgcttaaatttaaatctttaagccattgactcgcgaatgttttccaataattttgccattcaatttcttcaccaggtttacagaagaattccaattccatttgttcgaattcacgtgttctaaagataaagttaccaggcgtaatttcattacggaatgatttaccgatttgtcctataccaaaaggtaattttttacgcatagtacgttgtacatttttatagttaacaaaaataccttgtgcagtttcagggcgtaggaaaatttcgttagtagaatcttcagtaaccccttggaaagtcttaaacataaggttgaattgacgaatatcagtccaattcgctgtgccacttacaggacaaacgataccttcttcatcaataatgcgtttcatttcatcaaagcttaaaccgtcagcgacaaagttttcgtcacctttttcatttaacatgtagtcttcaatgattttatctgcacgataacgaattttactatctttgttatcgatcatcggatcattaaaattacctaaatgacctgatgcttcccaagttttagggttcattaaaattgcagcatcaataccaacattatatggtgattgtgtaatgaatttttgccaccatgcctttttaacattattttttaattcgacaccaagtgggccgtagtcccatgtatttgatagaccaccataaatgtcactaccagggaatacaaaacctctatgttttgctaatgagacgattgtttccatatcttttgtcattaaatataactctccttttttacataaaaacgccccaagacacagaataagccaaaaagtttaatctatatcttgggacgagttaatctttttaatcacatatgtaatatatgtgtttatttactagattcatgttaacccgcggttccacccaaattagtgtgtacactcgcttttaactatcatttaattttagccattgttacttgttaagctttcaccatccttaactcgctttaagtctaattttaatgtattgatagtttataagcaagtaaatatatgtatttgtagcaattaaaaattcaatgtataattaagaagaatgaataaaggggtgagtgttatagaactaagtaaaaggcaacaacaaataattgaaatagtaaagagtaatgggcctattacaggagaacatattgctgatcgtctgagcttgactagagctacattgcgaccggatttagccatattaacaatgtctggcatattagaagctcgaccacgtgtaggttattattattctggcaaacctcagaataaattaattgcggatgaattgaagcaatatgttgtgaaagattatgcgtctcaccctgtcgtcgttaaaagtgagacgtcagtttatgatgcaatttgcaccatatttttagaagatgtcagcacattgtttgttattaatagtgatggtgactttatgggtgtttgttctcgtaaagatttactgagagcttctatgattggtgatgatatacatacaatgccagttaatattattatgacacgaatgccgaatttgagttttgtacttgaaggtgagaaagtcatacatgcagcaaatcttatgatcgaaaaagaaattgattcattaccaattgtagtaaagaaagataatgataaatatgaagttaaaggtcgtatttctaaaactacgatcactaaaatctttgtatccttactaaatgaataggtggttttaagtaaatgaaaaatattcaaataatcgtggcatccgactcagtaggtgaaacagccgaacttgtagcaagagcttgcatttcacaatttaatcctaaacaatgtgaaagtgaaataagtaggtatccctatatagaagcactagaaaatgtggatgaagtgatttcagtagcaaaagataccgaagcgatagtggtatatacactagttaaaccagaaattagaaaatacatggaagcgaaattagcagaatttaaaattaaagcagtggatattatggggccactaatgaatattttattagatcaaatagatgaaaagccgtattttgaaccaggtttagtccatcaactagatgaagcttatttcaaaaaaattgatgcaattgaatttgcagttaaatatgacgatggtaaagatccaaaaggtttattcaaggctgacattgtattgttagggatttcaagaacgtctaagacgccgttatcacaatatctagcacataaaagttacaaagttatgaatattccaatcgtacctgaagtaacacctccagatgatttatttaatatagattcttctaaatgtatcgctttaaaaattagtgaagaaaaattaaatagaattcgtaaagaaagactcagacaacttggcttaggtgaaagtgcaagatatgctactgaacaacgcatagaagaagagctgaattatttccatgaattagttgataaaattggttgtcctataattgatgtttcagataaggctattgaagaaacagcaaatgatattatcagtcttattgagcaaaataatttcaaaaattaacgaaaacaattataatagtatgactaatgtttaataggtgataatattgagaatcgatcaatccacgataaatgaaataaaagataaaacggatatacttgatttagttagtgagtatgtgaagttagagaagagaggacgcaattatataggtttgtgtccttttcatgatgaaaaaacaccctcatttacagtttctgaagataaacaaatttgtcactgcttcggttgtaaaaaaggtggtaatgtttttcaattcacacaagaaattaaagatatcccatttacagaagcagtaaaagaattaggtgaacgtgtaaatattaaagttgaaaccgatcaaagttatgctaatcaagacaatgggcatcaagtcgcttcagatgatttaaaaatgattgaaatgcatgaattaatgcaagattattaccattacgcactgaagaaaactgttgaaggtgaagcggcattaaattatttaaaagaacgtggttttacagatgaattaatagatgcaagaaaaattggttatgcacctaataatgcgcatttctgtcatgattttttaaagaaaaaagaatatgacattgaactagcttatgaatctggtttgttgtcacgaaatgaagagaattttagttattatgatcgatttcgtgatcgtatcatgtttccattaaataatgcacaaggaagaactgttggttattctggtagaacatatacaaatcaagagccaaaatatttaaatagtccagaaacacccatatttcaaaagcgaagattactttacaatgtagataaagcaagaaaatcaatacgtaaaaatgatgaaattattttattagaaggctttatggatgtaatcaaatcagatcaagcaggattgaaacaagttgttgctagtatgggtacacagatttcaaatgaacatattgcctttataaagaaattaacaacaaatgtcactttgatgttcgacggtgattttgcgggtactgaagctactttgaaatcaggacaggctctattacaacaaggctttaacgtctttgtagtacaacttcctaaaaatatggaccctgatgaatatattggtaaacatggcgcagacgcttttaattattatgttgaacatgagaagaagtccttcatcatttacaaaattcacacgcatcaagacgaaatagaaaacaatgatctagcatatgaaagatatttaaaagagataactaatgatatttcatttatgcaatcaacgattttacgcaaaaaaatattgcaagaagtatctgaattgtttaaagttagcttggatagtctaaataatgaagtaggacagcaacaagattattatcaaccacacaattatcaaatacccactgttcctgaatttaataatttgagcaaacatgaaaaagcagaacgtgctttattaaaacattttatgaacgataaagacactttcttgaattatcataaattacttcaaacagaggactttacaaatcaatattttaagcgtatatttaatgttttacatgagttttactctgaaaatgatacgtttaatattagtgatgtgttacagtatatcgatatcaatgaaatcaaagaagcatttatatcattagataattatatgataaatgaagaaccttatgaatatgagattgacgattatataaatacactgacatctaatagaaatgaagaaacgattgaatcgcttaatcaaaagttgcgggaagcttcaaggttaggtgatttagaactgcaaaaatattatttagaaaaaattgtaaatcacaataaaaatagaatgaattaattttttatgtatttgtctgtatatttatttatatggggttgctaaaatgtatactaagtaaatattttgagtagatttcactaattttatctataaaaatattttgatatcaatttgatattatattcgggaggccatttcatgtctggaaataacgttaaagttaaaaaacaaacgattgatccatctctaactttagaagatgtaaaaaaacaattaattgaaaaaggtaaaaaagaagggcaccttagtcatgaagaaattgcagaaaaactgcaaaatttcgaaatggattctgatcaaatggacgaattatttgatcaattaactgataatgacataagtttagttaatgaaaaagatagttcagataaagattccaaattaaatccaaatgatttaagtgcacctccaggcgtaaaaataaatgatccagtgcgtatgtatttaaaagaaatcggacgagtaaatttattaaacgctcaagaagaaattgaattggcgaaaaaaattgagcagggcgatgaagttgcgaaatctcgattagctgaagccaatttacgacttgtagtaagtattgctaaaagatatgtaggtcgtggcatgcttttccttgaccttattcaagaaggtaatatgggtttaatcaaagcagtagaaaagttcgattttaataaaggatttaaattttcaacttatgcaacttggtggattcgtcaagcaatcactcgtgcgattgctgaccaagcacgtacaattcgtataccggtacacatggtagaaacaattaacaaattaattcgtgttcaaagacaattattacaagatttaggtagagatcctgcacctgaagaaataggggaagaaatggatttaccaccagaaaaagtaagagaaatcttaaaaattgctcaagaacctgtatcacttgaaacaccaattggtgaagaagatgatagtcatttaggtgattttattgaggaccaagaggctcaaagtccttctgatcatgcggcctatgaattgttaaaagaacaattagaagatgtcttagatacattgacggaccgtgaagaaaatgtactacgcttacgttttggtttggatgatggacgtacgcgcacattagaagaagtaggtaaagtatttggcgttactagagaacgtattcgtcaaatagaagcaaaagcgcttagaaaactaagacacccaagcagaagtaaacgtctaaaagactttatggactaacaagtaatataaacataaattggaaaccacacgttattgtgtataaattgttaaagcaatgactgactgatttctaaattcactcacgctaagtattttgaaatcaatttatctttgtagggggcgggcatacgaaatctaattacatttttagatttcaatcccgctccttttttacatatatcagaggagtaacaatatgattccattaaatcagagattaaaaaaagtaagtacttttattcaaggtaattgtttagctgacattggatcagatcacgcctacctaccaatttatgccattgaaaatcatttaattgattctgcaattgctggggaagtgattaaaggaccatttgatgcgtctattcgcaatgtacgagattataaactgagtcatgaaattgatgttaggctcggagatggcttaactgttataagacccgaagaccatgtcacttctgtatcaatttgtggcatgggtggtccattaatcgctaaaatattaaatgaaggcactgaaaaattagaaaacaaacctagactgatattacaaagtaatattcaatctagtgcaatacgtgagcaactattaaagttaaactacactataatcgcagaagaaattttggaagaaaaaggtcacatctatgaaatacttgttgctgattataataatcattgtgaacctatgactgaacaagaaataaaatttggcccaaaattactccaaaataaaaccccattattttataaaaaatggaaacgcgaacatgacgcattgttaaaaataaaaagtaatttgaatccaaatgtacatacagaacgtttaagagaaattgataaggatattaatttaattaatgaggtgatttaaatgaacatagaaaatttactgaatatcattaataagcatgttccatttgcttctgctgaatcttgggataatgtaggattgttaattggcaataaaagcgcaacgatttcaggcattatgactgcacttgattgtactgaagaagtagtagatgacgcattaaaaaatcactgtaataccattatttgtcaccatccacttatcttcaaaggaatcaaacaaataacacaagatgatggttatggtgcaattttaagaaaattaattaaacatgatatgaatgtcattgcactacatacaaatttagatgtttaccctaaaggcgttaatgcaatgcttgccaataaacttaagttaaatcatcaacgtattttaaatcctgagttacgctcctattataaagttcaagtctttattcctaaagaaaatttaatagactttaaaaataaattaagtgaagcaggattagcagaagaaggggattatcaatattgtttctttgaaaccccaggaaatggacaattcaaaccgattgagggtgccaatccgcacattggtgaattagaccaaatttcatctgttgaagaatataaattagaatttatgattgattataatcagaaacaactagctcaacaacttataatgcaacaccatccatatgaaacacctgtatttgattttatagaattacaaaaagaagcagattatggcttgggaatgcttggtgaattggaagaaacaatgaatacaatggcatttgtaaaccatgtgaaaacgaatttgaaaatgcctagtgttagatttacaggtaatttagatgcagacattaaaacagtagcaattattggtggttcaggtattggatttgaatttgacgctataaataaaggtgcagatatatttgtaacaggagacataaaacaccatgatgctttagatgcaaaaatcgcaggtatgaatctattagatattaatcattacagtgaatatgtaatgaaagaaggtttatgtgagttattagtagattggttaaataatgaaacagaagattttaaaattatagcgtcaaaacttaatacagatcccttcaactatctataattaaaattttaaaaatttataggttatcttaaaccaaaatatgcccgaatcaatagaaacaacaaatagtaaaatactatatgaattattagggatacttttttatggtagatacactaaataagttaataagtggttgagatataaataagtatctcaaccattttaaatgctgtagagtaaaaagtaagattgttctgcgaaattattttgataaggtgcgtatttctctacaaagactacttaaaggttcaaagtcagattccaaatcaataatttagttcaaaattatagtgttttgctttataatagacaagatgaagatttaaggaggccaagacatggcaaatcacccatttgaaaaatttaatttagaagcaggtcttatagatgctgtgaaagatttgaattttaatcaaccgactgaaatacagacacgtgtcataccaaagataattaaacaagtgaatttaattggtcaatcacaaacaggcacaggaaaatcacatgcgtttttattaccattattaaattcaatcgatacagactataaagaaccacaagcaatagttgttgcaccaacacgtgaactagcacaacaactatttgatgtagcaagtcatttaacaagattcaaagaagacgtatctgtaaaactcttcattggcggcacagatatcgaaaaagatcgtagccgagttaagaaccaaccgcaacttatcataggcacaccaactcgaattaacgatttagctaaacatggggatttacatgtacacttagcttcttatttggtgattgatgaagcagatttaatgattgatttaggactaatagatgaagtggattacgtagcaacaagactagatgaaaatgcacatattgcagtatttagtgcaactattcctaagtcattgcacccatttttaaataaatatttagaaaatccagaatttgtagaaattgaaaacacagaaaaaaataagaaaaatatcgaattttatttaatacctacaaaaggtgaagcaaaaatagaaaaaacactaaaactgatcgatatattaaatccatatttatgtattatattctgtaacagtagagatagtgcagatgaattagcaaaacaattaaatgctgctggtttaaaattagggatgattcacggtggtcttacacctagagaacgtaaacaacaaatgaaaagaattagaaatttagaattccaatttgtgattgcaagtgatttagcttcacgtggtatagatattgacggtgtaagccatgtaattaacttcgatgtgcctaatgatattgatttctttacacatagagttggacgtacaggacgtggtcaatacaaaggtgtagcaattacattgtacagtcctgatgaagagcataatattgcattaattgagcaaagaggttataaattcgaaaatgtagatatcaaagacgatgaattaaaaccaataaaagcgcataatatgcgacaaacgcgtaaaaataaagacgatcacttaacaaatcaattgaaatataaagttaaaacgaataagaaaaaagtaaagccaggctataagaaaaaattcaaaagagatttagatgatttaaaacgtaaggaacgtaaacaatttagtaaacagaaaagtcgtcaagatagaaaaaatagaaaaggataggtgaattttatgttattaggatcacatgtatctatgaatggtaaaaaaatgttagaaggttcagctgaagaagcacataaatttggcgaatctacttttatgatttacacgggtgcacctcaaaatactagaagaaaacctatcgaagaattaaatattgaaaaaggtcatgagataatgaaagcacatggtctttccaatattgttgttcacgcaccttatattataaatatcgcaaatactgttaaaccccatgtctttgaattgggtgtagagtttcttcaaagtgaaatcgaaagaacacaagcacttggtgcacaagatattgttttacacccaggctctcatgtaggagaaggtacagatgctggtattaaaaaaattatagaaggtttaaacgaagttttaacgaacgataataatgtaagaattgcattagaaacgatggctggaaaaggttctgaagtaggtagaaactttgaagagctagcaagaattatagatggtgtaaaccataatgatcgtttatcggtttgtttcgacacatgtcatacacatgatgctggctataatgttaaagaagattttgatggtgtactaaatgaatttgataaaattatcggtgtagatagaattaaagtagtacacgtcaatgatagtaaaaatgatattggtgcacataaagatagacacgaaaatatcggttttggatatattggctttgatgcattaaattatgtcgtacatcatgatacatttaaagatatacctaagatattagaaacaccttatgtaggtgaagataaaaaaaataaaaaaccaccatataaattagaaattgaaatgttaaaacagcaaaaatttgatgaagatttaaaaaataaaatattacaacaataatgtttgtttaaaattaaactaatatattgaattgagtaagcgtaagtatcctagatataaaataggctatttgtgcttactcttttttgttaattcggaaacattactatttacatattgggttcgacgttgtatagtatagaacgaggtgaaaacatgactacaccagtattcgaattaaaaaatattgattattattttgataacaaacaagtacttgaaaatataaatataaaaattaatcgaggagagtttgttgcaattgtaggacccaatggtgctggaaaatcaacactattgaaaattatcctagggttattacctatccaaaaaggtcaaatatatgtggatggaaaagattataatggcaaacaatcattgttaaaaataagttacgtctcacaaaaagcacaagcctttaaagcggggttccctgcaagtgttaaagaagttgtgataagtggtctaactaaacgtaaaagactgtttcaatggttcaataaaaaagatgagagaaaagtagaaattgtattaaaaagactgaatatagaacatttaatagataaaaacattgctgaattatccggaggacaacaacaacgcgtcttaatagctagagcacttataagtgagccttcggtattaattttagatgaaccgaccagtggtattgatgcaaaacatgttagtgaattttatgaaacgttgaaaagactcaaaaatgaaggcgtaacaattatactagtaacgcatgatattggtgtggttgccgatacagctacagaggttgcatgtctcaataaacatttacatttccatggaacaacagaagcatttaaatctctagacgaagtagaaatttcaaaaatttatggtcatccaatacaatttgttgatcatcaacatagtagggagtgttgttcatcatgatagaagccctactgaattttgattttatgagatattcacttatcagtggtatattaattggtttcattgcaccacttattggtgcttttatcgttgttagaagattgtcactcattgccgatgcactcagtcatgttacactgggaggtatttcctttggcatgttcattataacggtgataccagcatttgtatttattaacccaatgtggtttggtattttatttgctattataggcgctttacttatagagaatttaagaacatcttatagtaattatcaggaaattgcgatacctatcatcatgagcgcaggtattgcattaagtgctatctttatatcactcgctgatggatttaaccaagaaatagttgggctattatttggttcaatcagtgctgttacattaagtgatttatcaactattatcgtgattgtagttatcgtactcatatttattttctcattttataaagaactatttatattatcgttcgatgaggaatatagtaaagtaattggaattccaaaatggatacaatttttatttataattatcgttgcaatggtaatttctgcttctatgcgtgttgtaggcatattattggtaagtgctttaattacgttaccagtagcagtttcaatgcgaataactaaaggatttaaacaattaattatattgagcgtgattattggagagttttctgttatcgctggacttgttctagcattttatatgaatatatctcctggcggtgtaatagtagtactacttgtacttattttagcaataacgatgatgtatcaaagattaaaagtaaaatcgattaaaggagttgctaaagatgaagactgaagaagctattggcattattaaaaatcatggacacaaatatacaaataaaagacgtgaaatgattgatatttttgtagaagaagataaatacatcaatgcaaaaataatacaacaaaaaatggacaaaaattaccctggcatttcattcgatacaatttatagaaacttacatttatttaaagatttaggtattgtagaaggtactgaattagatggagaaatgaaattcagaattgcatgtactgatcatcatcaccatcattttatttgtgaatcctgtggcgatacaaaagtaatagatttttgtccaattgatcaaattaaagcatttttaccaaaagtagatattcacacacataaattagaagtttatggcatatgcgaatcgtgccaaaaagcataatatatgagtaattgatttaatgtaaaacgtgacaaattcattctttctacaagcttatctctttttaaacataggtcattagtatgaattaaagtgaatttttaaaattgtttgataaacatgtttaaataagctgtttttgagatatactaatagagtaactaaagataacaaatactatattatgacattacaattaatgtttaagcatattaattgttgtcatcattaataattgttatgctttatttaaagattaattaggaggatgattatttatggcttttgaattaccaaatttaccttatggttttgatgcattggaaccacacattgataaacaaacaatggaaattcaccatgacaaacaccataacacttatgtaactaaattaaatgcagcagtagaaggaactgatttagaatctaaatcaatcgaagaaattgttgcaaacttagacagtgttccagaaaatattcaaacagctgttcgaaataatggtggtggacacttaaaccactcactattctgggaattattaactccaaactcagaagaaaaaggtactgttgttgataaaattaaagaacaatggggctctttagatgcatttaaagaagaatttgctgacaaagcagcagctcgtttcggttcaggttgggcatggctagttgtgaataacggtaacttagaaatcgttacaacacctaaccaagataacccattaactgaaggtaaaacaccaatcttaggattagatgtttgggaacacgcatattaccttaaataccaaaataaacgtccagactatattagtgctttctggaatgttgttaattgggaaaaagttgacgaattatataacgctgcaaaataattgcgcggacgattatgacggccttttcaaaggtcgtcatttttttaactaaaataatagaaatattgactgatttcatatatcatttgtagtgagaactattgaatagaggtatgctgttttgctaaaaagattaaaagaaaaatcaaatgatgaaaaaattagaaatacgatgaataaaagaattagctttatatttggaatcattgtattcatttttgcgataattgttttaagattaggatatttacaaattgcacaaggttctcattataagcaacttattaaaaatagtgaaaacctgacagtcaacgaagctgttcctagaggtcgtattctagataggaatggcaaagtccttgtcgacaatgcttctaaaaaagcgattacatatgcaagaggaagaaaaacttcacaatcagaagtattgaaaactgctgaaaaattatcaaaacttattaaaatggatacagataaaattactgatcgtgataaacaagattattggatacaacttcatccaaataaagctaaaagtttaatgaaaaacgagcaagtattgttagatgacggtaatattacccaagatgaatatgatgatgctttatataataaagtaggtaaaaatcaaatcaactcactaaatgataaagatttacaaatccttgctatttatagagaaatgatgtctggttctgcacttgatccacaaacaattaaaaatgaagatgtaagtgatgaagagtatgcagccgtttcgcaaaaattatctgatatgccgggtgtaaatacgactatggattgggatagaaaatatccatatggtgatacgttaagaggcattttcggtgacgtttctacgactaaagaaggtattccaaaagaattgactgagcagtatttagccaaagggtattctcgaaacgatcgtgtaggtaaatcatatttagaatatcaatatgatgatattttaaaaggtaagaaaaaagaaatgaaatataccactgataaatcaggtgaagttatagactctaaagtaattaatccaggttcacgtggcgatgatcttgtattaagtattgatatagatttacagaagaaaactgaagaatatttagaaaagcaaatctcaaaattgcgtagtgaaggcgctaaagatatggacaatgcattaattgttgtgcaaaacccaaataatggtgatatcttagcaatggcaggtaagcaaatagataaaaatggtgatttaacagattatgatattggaacatttacttctcaatatgcagttggttcctcagtaaaaggcggcacgctacttgctggctatcaaaataatgcaattaaagttggagaagaaatgattgatgagccgcttaaattcgctggtggtttaacaaaacattcttatttcaaccaagatggtaaagtaagaattgacgataaagaagcactcatgcattcatcaaacgtttatatgttcaaaacagcattaaaattagccggatcaccttatactccgaatatgtcattaccaaccgatattacgagcgctggacaaaaattgcgtaaaggtttaaatcaggttggtttaggagtgaaaacaggtattgatttaccaaatgaaacaaacggacaaattgagccattaacagacaatcctggtaattaccttgatttagccataggacaatatgatacctacactcctatgcaattatctcaatacgtttcaacaatcggtaataatggttatagagttcaaccacatgttggtttagaaattagaaaagcgactaacaaagaaacgcttgggccagttaaagaaaaagtgaaaggtcaagtgttgaataaagttaataatacacaaaatgaagtgaacgaagtacaagaaggattcaaaatggcatttaacgaaaaagatggaactggttatcaaagtttcaaagatacagaagtaccatcagctggtaaaactggaactgcggaagtatttcaagatggcgaaccaagagttaattcaacttacattggttatgcgccaatcaaaaatccacagcttgcattttctattgtatatacaaaccaaccagtacctgagccatggttaaatggtggcgatttaggacgagatgttattaattactatttcaaagaaaagtcaaaagattaatattttagcatcaattttattgaaaatactggtatagtcgcctttattgaaaaataatacttttcaattttataactaaatggtatgattaattagtcgtattttgaaaaggtaaggaggaattagcatgcgcgtaaacgtaactctagcttgtacagaatgtggagaaagaaactacatcactacaaaaaataaacgtactaatcctgaacgtatagaaatgaaaaaacactgtgcacgtgataacaagcacactatgcaccgtgaaacaaaataattaatattatttaaaccagattctattagaatctggttatttttatctggtttattaaaatgagtgaataaatcaatttataattaacattttaaattttcataacttaaatcttataaaaaaattgtgattcaaattgcagtttaatgacattataattcattaacgttataatgataaaagtatgaattacgggaaggtgtacaaaatggataaaaaattattgagaaaaaaacatattgaattaatgaaatcttttatgttaaacaaacaggaaaaacaacgagcagatcagtttttagctaatcaattttttaataccgatgaataccgcactgcttctcgtataggtattgtattatccatgccacacgaagttaatacatatactttgattcaacagatgctagacgatggtaaacaagtatttgtacctgaaacaaattaccaattgcgtgaaatgtcttttaaacatattgacgatttaaagcatattgataaagatgctaaagggataaatcatataaatacaaagactgaaatatccaatgaattagatttattagttgttcctggggtagcttttaatgatagtggctatagaattggttatggtggcggttactttgataaatttatcagtacatataatcaactaacgatgagtttaatttatgattttcaattaagtgactttaaagttgaaacacatgatcaacctgtagaaaaactaatcatagcgacaacaagataatggaggggaaaatgattacagaaaagcattattggaagtgtatttacacttggattaaatatctaaattatcatgttgtacataaaaatcaagaaactaacgaagtttggttagcgaatcaacgtaagcgtagtatcgttattttcaaatatggagcaaattcaacacaagaagtgagatttgataaaagcagaatccaagaaaatcagcaagatatcagtacttttctaggttttgaacctaataattatgaattgtttatttttactgataagcattttacagatgaaaatttaaatgaaaatcatccagtaaaatttaaggtcaagataattagagaagtagatcatatggaacgcttgctccctaatgtctttatcaaacaattatataaaagaaatacaaagcaaacaaaagggtattataaacagcgtgctttaaatacgaatccaattgaaaaacacatgttgaagttttctccagtgacctatgctttaatcatattaaatgttgtgatttggttatttatggtattgtttttaaatcgttcctcagatttaaagcttttagatgttggtggattagtgcattttaatgttgttcatggtgaatggtatcgtttgataacatctatatttttacattataattttgaacatatattaatgaatatgttgagtttattcatatttggtaaaatagttgaatcaattgtaggtcattggcgtatgttcgttatctatttggtagctggtttatttggtaactttgcttctttatcttttaatactgataccgtttcggtaggagctagcggtgcgatttttggccttattggtgcaattttcacatttatgtatataggcaaacaatttaatcgtaagcttatcggtcaattattaattgtacttgtcattatgattggtttatctttatttatgcaaaatataaatatcgtggcccatattggtggatttattggcggattattgattacattaatgggatattatttcaaaacgaataaaacacgtttttggattattttaattactattcttgttttatttttagctgctcaggttagaattttcaccattaaggaagataatatctataacagcattattactaaagaaatgaaacaaggtaattatgatgaagcgaaaaatatggttcaacgtacaatcaataaaagctatgcagatgatgaaacatattatttaagtggattgattaaaacaacacaaaattctaaagctgagggcatcgcatcttgggaacgtggcttacgatatttccctaattcaggtatcttaaattaccaactcgcaattgcaaataaatcattggataataatgataaagctaaaaagtatatcaaaaatgcattaaaagctaatccaaataatagagattatattaatttaaataaagaattgagcgataatagtgattcagaaaattaattcattttacgatgttcagcaacttttaaaaaaattcggctttattatatactttaaagataaagcggatatgtatgaaatgatggaacaagagataaaatctttatatgattataatcttatatcaaaagatgaatatttaaaatgcagattaatcattagtcagagaaggagtaagtaatatatgaataaaatcatactagcagcagatataggtggtacaacttgtaaattaggttgttttgatgaaaatttaaatcgtatttcaaaatggtcaattaacacggatacatcagatacaacgggttatcaattgttgaaaaatatttataatgcttttgtcgcatatattgatcaatctgattatactttttctgatgttatcggtgttggtataggagttcctggtcctgttaattttgaaacgggtgaagttaacggtgcagtcaatttatattggacggaaccagtaaatgttaggaatattttcaaacaatttgttgattgtccagtttatgttgataatgacgctaacgtagctgcactaggagagaaacataaaggtgcaggtaatggtgttgatgatgtagttgcaattacacttggcacaggacttggcggaggtattatttcgaatggcgaaatcgtacatggacacaatggttcaggagctgaaattggtcatttccgagtagaccatgaccaacgttttaaatgtaattgtggtaaatcgggttgtattgaaacagttgcatctgctacaggcgtagttaatcttgttaacttttattatccaaaattaacttttaagtcatctatactccaattaataaaagaaaataatgtaactgcaaaagctgtttttgatgcggcgaaagcaggagatcaattctgcatatttatcacagaacgcgttgctaattatattgcttatttatgtagtattttaagtgtaacgagtaaccctaaatacattgttttaggtggtggtatgtcaactgcgggacttattttgattgaaaacattaaaacggaatatcataatttaactttcactccagcacagaaagatactgaaatcgtacaagcgcaacttggcaatgatgcaggcattacaggtgctgcaggtttaatatatacttatgtaattgaaaaggaaggtgcaaaataatggcaattgtagatgtagtcgttataccagttggtacagaagggccaagtgtaagtaaatatattgctgaaatacaaacgaaattaaaagagtataaaaatcaagggaaaatagattatcaactgacacctatgaatactttaattgaaggtgacttgaaagatctattcgaagttgtgcaagcaattcatgagttaccttttgacaaaggattagatcgtgtttgtacaaatattagaattgatgatagaagagataaatcacgtaaaatgaatgataaactaaaatctgtggaaaaccatttgaataatggagggcaagcataatgaaaatatcaagtttaactttaggattggtcgatacaaatgcttattttatagaaaatgagacaaatgtacttttagttgatcctgcaagtgatagcgacttgattattaaaaaattaaatcaaattaataagccattatctgcaattttattaacgcatgcacattttgaccatataggtgcattagatgctattgtagaaaagtatcaagtacccgtgtacatgcataaagcagaatttgattttttaacagatactcaaaaaaacggttcagaaaaattcaaacaatatggccttccacaagttattagttcagtgacaccacaatcattaactgaaggccagacaaatattgctaactttgagttcaatgtcctgcatatgccaggtcattcaccaggtagtttaacttttgtatttaaagattttgcagttgtaggagacaccttgtttaaacaaggtatcggtagaacggatttatataaaggagattatgaaactttagtagattcgatacttgataaattatttacgcttgaagaggacctaccattattccctggacatggaccatatacaactgttgaagatgaacaacttaacccatatttgcatgggtgaatagctttcaatttaacgcaaactttataagtagattagaagtaatttatccatctcttacgtgtatataagtaggaggtggattttttgaaacttttatttaataatatacttaaaaaagcgattagtacaaaggccactgatgtgcactttattccttcaaatgacaaaatatatattaaattcagagttcaagatacgcttgcaccaattgaatccatacagcaacatatttatttgaaattattaacctatatgaaatatcaagctggtttagatgtgtctaaacataatgttgctcaaagtggtagatatacttacaaattcaagcaaatttactttttaagaatatccacgctacctttatctctgggaatagaaagttgtgttatcagaattgttccacagtattttcaaaaaggaagtgatacaagtaatttaggtacattatataaattaatgaataaaaaacaggggcttatattattaagtggacccactggttccggaaaaagcactttaatgtatcaaatggtcatgcatgcaaaagagcagttagatttaaatatcataacagttgaagatccagtggagcagctagtatctggaattacacaagtatcgattaatgaaaaagcaggtatcaattatgcaaatacttttaaagcgattttaagatgtgatcctgacattattttgattggtgaaattagagatgccataatagctaaacaagtaatgcatgcgagtctaagtggtcatttagtattaacaacaattcacgctaataactgtaaaggcgcattattaaggcttaaagaaatgggactaacgatgcaagaaatgaaacaagctttattaaccgttttaaaccaaagactaattacgacttataataatcaaagaaaacttgtatatgaacaacttactaaagcacaaataaatcatttaatagacaatgactatacattacctagttcattttctaatttgtctactcaattaactcaattagccaaagcaggtgttatttgtgaggaaactatggagcgctatatttaaatttaaaaatattttcaatttatcagaaaaaaacaaaataacgttattgataaaattaaaagatttgttagaccgcggttatacgctaagtgaagcatgtctttttttaattcaatatacaaacattaaaaatcgccaattaaagttgcaaattgaaacagaattaaataatggtgctggctgcgcaaaaatattaaggttactaaattatcctaaatccatcgtaacgttaatcaattttgcagaaatatttggagatttaactattactttgccacacgcttatgaatatttagtaaaaaactataaatcgaagcaacgctttttaaaaacaatacaataccccgcgttgttacttatcgtttttttgataatgttaattattttaaaccatacaatcatccccgagtttcaaaatttatatagtagtatggatgtaagtatttccccattacaactctatctatctttattcatcacaaacctcccatcgtatttcctatatagttcaataatttttatactaatcattttaggtattttcatcatatatagaaagtcatctatagaaataaagcataaaatcctcttatcaatacccattatttcgaaatttttcaagtattataaaacattttgcttagcttctgaattatctttattttataaaaatggtataactttacaaaagattgttgaaatatacgctaaacagcaagatgaatatttaatatttttagcaaatgaaatttcaaaagggatacaacaaggattaaatttaagtgaagtattaaagcatttacagtgttttaaaaaaatttgattatttttgttgaagaaggtgagaaaaaagggaggctagagatagaaatgaaactatatagtgaaatgatactgtctcaaatagaacagttgattcatttaatcataaagttcatacaacctattgttttctctttaattgctatattaatagtgtcattatatctagttattatgttgcctatgtttgatttaatgcaaacaattaaataattacgaatagaggaagttaaatcaattatgaaaaaactaaaaattaatagaaatgcttttacattaatagaaatgttacttgtattattaataattagcttattattaatattaattatacccaatatagctaaacaatcgtctcatttgcaaaatactggatgtgaggcacaacttaaaatgattgatagccaaattgaagcgtatgctttaaagtttaataaaaagccatcgtctatagaagacttagttacagaaggatacattaaagaaaatcaaaagtcatgtaaatctggtgcagccatcactattaacaatggtgaagctgttgcaaattaaaagcgcatttacttatatagaaatgctttttgtggtctgtattattagtttactcttatatttccaactatttaatatcagtgctttcgatactaataataacaaaatagaacaacgtaaaattaataatttaattatgcaattcaactatattaaatctaaagcgattaaagataaccaatcaattacactggtctttaatgattactctaataaaattattattaatgaacaattcccctctaataaaagcgccaaagcaataatactccctttaaatagctttatacatccaagaacaaatttgaaatttataacatttaataaaattggagaaacaaacaaatttggaagtgtctacctaaaaacgaataaaaatctttataaaatcatatttcatattgaaaaaggacgtattagatatgagaaaatttaatgttaatgcctcgttattgatggatagtcttttatctttttcaattatcacactgatttgtatcttatttatacctatgatattgcaattaaagttggatattcaacacaaaagccatgaaatagatctaactagaatattacttaattcactttaccactataaaagacaggaattgaaaagtggaattatgattgaagattatagcgttaaaatgagtaacgacaaaatttgtgttttcaaaaagggagaagcatatgaaaaatgtttcttcaaataaatttagagcttttacatatatagaagtcttgtttgcactttttataactatactcattttttcaatattacccgcattaattagaacgacaggcaccatcaatgagcaaattatgaatgctcaagaagtagacttggcatttttctcaagagatttgacacaagatttaattaaagaaaatgcttatgttcttaaaaatcaatccgatgaacaccatattgtaattagaaataaacagagaaacatcatttatgaatttaaaaataacaaattaattaaaacgttagatggaaaaggaaacattactacattacataatgttgttagtgcaaagttcaaaattgttaatgataaatctgtagtaattaattttaaaatttttgagaaaggtatttattatgaaaagaaaattgttttctaatcatcctgcttatatgtatccttttatgctagtcatatttatgctatatttatctttaattacgatttatacatttcaaattggattacaattaaaaatcttagataatattgaatcgtattataaagatcaaataaacacatacataaaaaaggaagttagttttgaataataaaatagaaccactcatacttattggatttatgggaacaggtaagacaactttgggtcaatttctagcaagtaataatcaactctcctatattgacttagatgaacatatagcaatacaggaaaataaatctatccctgaaattttcgaagccattggtgagcaaggatttagaaaattagaaaatgaatatctacaagaatgtgttcaacgttatgatatcatttcaaccggcggtggtataatagaaggcgatgaatcattccgaatattaaaagaacagccaaaagtaatctggttagattgtgatatagaaattctttacaaaagaattaaaaatgacagcaatagaccaaatgcaaataataaatcgttatttgaattaaaaagcttgtattcatctagggtttcaagatataatgaaatcgcattcataaaagtaaatagtagtcaatctctttcagatttacaaaatgatatcatggaagcgattgtttgcgaatgatcagtattagagagaatggtagttatacttaatataacttaactttagtccatcgccgaaggtgcaagtttttacgaaactctcaggcaaaaggataatactgtaacgcattcctgaaatattacaacagggtagtttaggctaccctgtttttttattatataatctttaggaggtttcttcatgtccaatgaacttaaaaaaacaccactatatcaaacttttgtagatagtggggctaaaatcgtagaatttggtggatgggctatgccagtccaattttctagtattaaagaagaacataatgcagttagaactgaaatgggtttatttgacgtaagtcatatgggagaaattatcataaaaggttcagatgcttctaatttagtacagtatttgctttcaaatgatactgacaatgtaacaacgcataaagcgcagtatacagctttatgtaatgaacaaggtggcatcattgatgatttaattacttataaattagaagaaaatgtttatcttttagttgttaatgctggaaatactgaaaaagattttgagtggatgtacgaaaaagctaaagcatttgatgctgaagttattaatgtatcaactgaatatggtcaactagctatacaagggccaaaagcacgtgatttagtccaacaatatgtaaatattgatgtatctgaaatgaaaccatttgaatttgaacaaaacgttgaattctttggtaaaaatgtaatactgtcacagtctggatacacaggtgaagatggatttgaaatatactgtaatgcagacgatgcaccatatttgtgggatgaaattctaaaaaatgatgtgacaccatgcggtttaggtgctagagacacattaagattagaagctggactgccattacacggtcaagatttaagcgaaacaatcacaccatatgaagcgggtatagcatttgctgcaaaaccattaatagaagccgattttattggtaaatcagtactaaaagatcaaaaagagaatggttctaaacgaagaacagtaggattagaaatgatcgacaaaggtattccaagaacagggtatgaagtatatgatttagacggtaatcaaattggagaaattacttcaggtacgcaatcacctttaactggtaaatcaattggactagccctaatcaatcgagatgcttttgaaatgggaaaagaagttgttgtacaggttagaaaaagacaagttaaagctaaaattgttaaaaaaaatcagattagtaaataaatcaaaggggtgttactgtgagtcatcgttatattccattaactgaacaagataaaaaagaaatgttggatacaatcggagcaagctctataagtgaattatttggagatgttccaaaagatattttattaaatagagagttggccataccagatggtgaagctgaaacgacattgacaaaacgcttaagcagaattgcaagcaaaaatgtaactaaagaaacgcatagttcatttttaggcgcaggtgtttatgatcattacgcaccagcagttgtagatgcaatgatttctcgttctgaattttatactgcttatactccataccaaccagaaatttcgcaaggtgaattacaagctatctttgaattccaaacattaatttgcgaattaacagatatggatattgcaaactcatctatgtatgatggtattacaagtttcgcagaagcatgtattttagcatttaatcaaacgcgtaaaaataaaatagttgtttcaaaaggactacattatcaagctttgcaagtattaaaaacttacgttaaaactcgagaagaatttgaagttgtagaagtagaccttgatggtacaattacagatttagaaaaattagaaaatgcaattgacgatgatacagcggcagttgctgtgcagtatccaaacttttatggatctattgaggatttagaaaaaatacattcatttattgaagacaaaaaggcactgtttattgtttatgccaatccacttgctttaggtttattgacaccgccaggtagttttggagcggatattgttgtaggagacacacaaccatttggtataccagcgcaatttggtggtccgcattgtggtttctttgcaacaacgaaaaaattaatgagaaaaataccgggacgtttggttggacagactgaagatggagatggaaatcgtggtttcgttttaacgctacaagcacgtgaacaacatattcgtcgagataaagccacttcaaacatttgttcaaaccaagcattaaatgcattagcttcttcaatttgcatgtccgcattaggtaaacaaggtatttatgacatttcagtacaaaactttgaaaatgctaattatgcaaaagcacaatttaaagaagctggtttagaagtttcaaatggcacatcatttaatgaatttgtcgtgaagtttaataaacctgtaaaagatattaatgatgcattactacaacaagatattattagcggttttgatttaagtgaagtctcaaaggattatgaaaatcaaatgttagtagcagtaacagaattaagaactaaagatgagatagatacatttgttaagaaagcaggtgaattaaatggtagtaagtaaatctagtccattaatatttggacgttctaaaaaaggtcgttatgcatattcgttacccaaaaaagaaatagataacggtgcagtagaaaaattattagacgacaaatttataagaaaaaataaagcagaactacctgaagtcgctgaattagatttagtacgtcattatactgagctttctaataaaaactttggtgttgattcaggattttatcctttaggttcatgtacaatgaaatacaatccaaaaatcaatgaaaaaatagcaagaataccaggattcgccgagtcacatccactgcaagatgaatcacaagttcaaggttctttagaaataattcatagtttacaggaagaacttaaagaaataaccggtatggatgaagtaacgttgcaaccagctgccggtgcacatggtgaatggactgcattgatgatattcaaggcattccatcaaaaaaatggtgaaggacatcgtgatgaagttattgtacctgactccgcacatggtactaacccagcttctgcagcatttgctggtttcaaagcggttacagttaaatcgaacgaacgcggtgaagttgatattgacgacttaaaaagagttgtaaatgaaaacactgcagcaattatgcttacaaatcctaatacattaggtatatttgaaaaaaatattatggatataagaaatattgttcatgaagctggcggattattatattatgatggtgcgaatttaaatgccattatggacaaagtaaggccaggagacatggggtttgatgcggtacatcttaacttgcacaaaacatttactggacctcatggtggcggtggaccaggttctggaccagtcggtgtgaaaaaagaattagctagtttcttaccaaaaccaatggtagtcaaagaagacgatgtatataaatatgataatgatatcgaaaattctataggacgtgtaaaacctttttacggtaattttggtatctatctaagagcttatacttatattcgtacgatggggaataaaggacttgaagaagtttctgaggcagctgtattaaatgcaaattatattaaagctcgattgaaggatcatttcgaaatcccttatccacaatattgtaaacatgaatttgtattaagtggttcaaaacaaaaagaacacggtgtcagaacgttagatatggctaaacgattacttgatttcggtgttcatccaccaacaatttacttcccacttaatgttgaggaaggtatgatgattgaaccaactgaaacagaatctaaagaaacccttgattatttctgtgataaaatgattgaaattgcaaatgaagcaaaagaagatccagataaagtcttagaagcaccacatacaacaatcatagatagattagatgaaactaaagcagctagacaacctgttttaaaatttgaaaatcttcgttctgaaaaagaataagtattatattaaataaatccggataattaattatccggatttatttttgtctattttaataaaaaacgagtaactatacatgaaatatagtgactcgcttattattaagtgaaatatttaaactactttttagatttgattttaccagtccattttttgtatccgcctttaagcatataaacatctttatacccatttttctttaaagttctagcggcacgataactggcaatgccattagcatcgcacagataaataggttgatctgttctcaaaccttgatatctttgtttaaacatagtaattggtatgttacgcgcaccattgatgtggccgtaatcataatctactttttctcttacatcaataacttgagctttacgcaaaccattatggaattcattttggtttaattctgtgactgctcttttattaagaagataattgattagcatgtaagcgataataattattaaaactgctaacgctataaaccaaaaattactcatcttgcatcctccctaattaaccgatattatatattataagactgttagcccaatttatcaaaatatttttgcttttgattaataagaaagactgacaaacttatacaattattgaaaacgataacacaaaatatatgttatcacaatttaatttagcgattggagttttgaatgtgacagaaacatggaattttatcaatactgggagtaaagatccttattttaatatggcgatggatgaagccttactgaattttgtttccagaggggaaatagatcctgtcattagattttatacttgggatcctgcaacattatctattggttactttcaaaggcttacaaaagaaattgatatcgataaagttgaagaaaaaggatatggacttgtcagacgtcaaacaggcggtagaggtgtgctacatgacaaagaattaacttatagtgtcattgttccagaatcacatccagacatgccctcgacggttacagaggcttatagagtaatttctgagggattgttagaagggtttaagcatttaggttttgatgcttcatttgccattcctcgctcgaaagaagaaagagctaaactcaaacaaccaagaagtgctgtatgtttcgatgctccgagctggtatgaattagtagtagaaggtagaaaaatagcaggtagcgcccaagttagacaaaaaggcgttattttacaacacggttcgttattgcaagatgtggacattgacgatctatttgacatgtttatattcaaaaatgagcgtttaaaagataaaatgaaacaagcctttgtagacaaagcagtcgccattaatgatatttcagatcgatatattacactagaagaaatggaagaagcttttgaaattggatttaaaaaaggcttagacatcaatttcaaaccactagagcttaatcaaaaccaaaaagaagaaataaataccttaattgaaaagtataaatcggatgaatggaattatagaaaataaatgaaaaagtattaaaaagcgcaacgacattcaatgtcgttgcgcttttaaaatagcacttattttttctttctattttgtcttttatatttacgttgcgcacgcttatatttacgttgatcttctgtcaaaaagaagaaataataaattgcgtaaataattccagcaaataccgctaagctaattgccattcttacaaaactaaaaataaatgcatctaaattaagaattaatccaactactgccacggcgatgacaatataaaatatcgcttgtttcacttaaaacactcctatgtgattctaactttgactattattgatacttatagttgataaagcattttgtcccttttgaatttttttcttatctttgccattgtaaccttctctaatatcactcattgcatcacttaattttttattgagtttagtaatgtctttatttttttccttgtcatcactactcattttttctttatttatatcgtttttgtacgtagtaaaggctgtatcaattttattagtgatatcggtaagtttttcttgaatttttttatcatctttatttttcgtgacatcactttcaattacatcgtactgtttaatagatttagcaatgtcttgataatatgtagaagatgcttttaagtttgtaactttcttattgttatttttagctgtagctatgttttttttatctttttccaaagctgtgatgttacttttttctttactaatttgttgttttaaatcctgaatgttacttttcaacttatgattttcatcgcgaagttgcgtggtctttacttctagtggccctaaattttgactaccacaaccaactaacaaacatgaagcacctaaaatagctacaatttttttcttcataatacgctcctaattcaaaaactataaatttatataataattatgctatcattttaatgtataaatggaaaatgtacaaatttattaaataggaggaagaaagatgactagaattgaaaaattaaattctgccttagaaacaaaacatttagaagcagcagtcatattatcagattttaacagaagatatttatccggtttcacaggtacaagtggtgcattaataataacgaaagaacaaaatttattaattactgactttagatacatagagcaagccactgcgcaagcaccagattttaaaatcatcaaacaacaaggttccttaattgatgaaataaagcaacaacttgaaaacttaagtgtgcaaaatgtcggatttgaaggtaatctagttagttatgatacttacttacaattgagtaaagcctacattagtttaattagtattagtggtgtaattgaaaaaattcgtgaagtaaaaaatgaagcagaaattcagctaatacaaaaagcttcagacattgttgatgaaacatttgagtatatattaactgttgcaaaagctggtatgacggaacagcaactaaaagcaaagttagaaagtaaaatgttagaattaggcgcagaagggacatcgtttgataccatagtcgcttcaggcgtaagaggagctttaccacatggtgtagctagcgataaagtaattaatcatggtgaaatgatcaccttagattttggtgcttattacaagggctatagttcagacattacacgaacatttgcaatcggtgagccagacccacaacttaaagaaatctacaatattgttttagaagcgaacttaaaaggaatagaagcagctaaaaaaggcattacaggtaaagctctagatgcagtagcaagagattacattacggaaaaagggtatggagatgcctttggacattcgttaggtcacggtatagggttagatgttcacgaaggtcccaatctttctagaaaatctgaaactgaattagacgtcaataattgtgttacaattgaacctggcatttatatagatggtctaggtggcgttcgtatagaagatgacattttaattaaagaaaatggctgtgaacgctttactaaatgctctaaaaaccttattattttatagaagaccttataatcgaggaggaaactgaatgatttcggttaatgattttaaaacaggcttaacaatatcagtagataatggtatttggaaagtattagatttccaacacgtaaaaccaggcaaaggttctgcttttgtacgttctaagttacgtaatctaagaacgggtgcaatccaggagaaaacatttagaggcggagagaaagtagaaactgctttaattgaaaaccgtcgtatgcagtatttatatgcagatggtgatacacatgttttcatggataatcaaacgtttgaacaaacagaattaccagctgactatttagaatatgaacttaacttcttaaaagctaatatggaagttcaaattcagtcttatgaaaatgaaacattaggtgttgaattacctaaaacagttgaacttactgtaactgaaacagaacctggtatcaaaggtgatactgcaaatggtgcaactaaatcagcaacagtagaaacagggtatacgttaaatgtacctttatttgtaaatgaaggcgatgtacttgtgattaatactggtgacggtagttacatctcaagagcataatagtttaattttgtatttacttatcgaaattacatttaaaaaaacctttccaatgcgctatactttggaaaggtttttattatgttaaaatagatagaatcaaataatattatttaaaattgcactaatagtttacttttgaaataaggtatagttatatggaacactacaaaagtgaatcagtttaatatagaaagtatgtatatgcttgaattgagcatatctctaaagtaaaataaactaggtaaatgaaaacaatctgaaggagtcagtatttatgaattttaaagaaattaaagaattaattgaaattcttgatcaatcaagtttgactgaaattaatatagaagacaagggcaatgttgttaatttaaaaaaagaaaaagaaactgaaatcattacaccacaaatttcacaacaaccgatgcaacaattagcgccgcaacaaggtgtagcatcaaatccagtagctacaggtagtacagaagaaactactagcgatgcaagtacaactgacgataacctacaaactattaatgcgccaatggtaggtacattttataaatcgccatcaccagaagaaagtgcttacgtacaagttggtgattctgttacaaacgaatcaactgtctgtatattagaagcgatgaaattatttaatgaaattcaagccgaagtaactggggaaattgcagaaattttagtagaagacggtcaaatggtagagtatggccaaccgttatttaaggtgaaataatgaataaaattttaatagcaaatagaggagaaattgcagtaagaattattcgtgcatgtcatgaacttggattgcaaacagtggcaatatactctgaaggagataaagacgcactacatactcaaattgctgatgaagcatattgcgttggcccaactcaatctaaagattcttacttaaacatcccaaacattttatcaatagcaacttctactggatgcgacggtgttcatccagggtacgggtttttagcagaaaatggagatttcgcagaattatgtgaagcatgccagttaaaatttattggacctagctatgaatcaattcaaaaaatggggattaaagatgtagctaaagaagaaatgaaacgtgcagaagtacctgtagttcctggtagcgaggggttagttcaagatatcaatgaagctaaaaaaatcgctactgaaattggctatccagtaatcattaaagcaactgctggtggcggtggtaaagggattagagtggcacgtgacgaaaaagaacttgaaactggttttaaaatgacacaacaagaagcagaaaccgcatttggcaataatggcttatatctagaaaaattcattgaaaatttccgtcatattgaaatacaaattatgggtgatagctttggtaatgttgtacatttaggtgagcgtgactgtacaattcaacgaagaatgcaaaaattagttgaggaagctccttcaccgatacttaccgaagaaaaacgccaagaaatgggaaatgcagcagtcagagcagcaaaagccgtaaattatgaaaatgctgggacgatagaattcatttatgacttagatacgaatgacttttattttatggaaatgaacacgcgaattcaagttgaacatccagttacagagatggttacgggtgtagacttagttaaactacaattgaaggttgcaatgggtgaaaaacttcctttcaaacaaaaagatattaaaatcgagggacatgcaatggaattcagaatcaatgctgaaaatccatataaaaatttcatgccttctccaggtcaaatcactcaatatttagctccaggcggttttggtgtgagaattgaatcagcttgttatactaattatacgattccaccttattatgattctatggtagcgaaactcattgttcatgaaccaacacgagaagaagcaattatgacaggtttacgcgcactaggtgagtatcttgttcttggcattgatacaacaatcccattccatattcgtttactaaataatgatatttttagaagcggcgtatttaatacgaagtttttagaaacacataatattatggatgatcaatctaaataggaggtaattgacatggtcaaagtttcagaaacctcacattcccaattaggtaaaatagaaatagcacccgaggtattaacagtcatagctagtattgccacttcagaagtaaaaggtatacaagggcattttaaagaattaaaaaaaggcagcattgaaaacattagcaaaaaacagcttagtcgcggtgttaaagtagatacaaatgatgaaggcatctatatcgatgtatattgttcattagcgtatggtatcaatatatcggaaactgctaaaaaaattcaacaagctatttataattcgttaacgacgatgacaacaattgaacctagtcaaatcaatattcatattacacatatagaaccaataaattaaaattataaaagcaaatttactttaaattcattttgcgaaaagcgattgcttctattttaagcatctcttttcgttaatggtttactataatactatgcttgaaggagtttataatgagtcgaaaagaatccagaacgcaagcctttcaaactctatttcaacttgaaatgaaaaatagcgatttaacaattgaagaagcaatcagttttattaaagatgataatccagatttagaattcgaattcatcagttggttagtaactggtgttaaagatcacgaagttgtgctagatgaaaaaatccaacctcatttaaaggactggactttagcacgattgttaaaatctgatcgaattatcttaagaatgtctacatttgaaatgttacatagttcaacaccacaaaaagtaattatcaatgaagctgttgaattagcaaaacaattcagtgatgatgatcattacaaatttataaacggtgtattgagcaatattgaatagaagagtgatataacatgtcagaatatttaagtgtaacttcgttaactaaatatattaaatataaatttgatcaagatcctcatttacaatccgtattgattaaaggcgaattatctaattttaaaaagcatagtagtggacatctgtattttaatgtaaaagataaaaacagtgtcatcagtgcaatgatgtttaaaggaaatgcatcaaaaattgattttgaacctaaagaaggggacgaagtgctattagaagcacgtgtttctgtctatgaacgtcgtggtaattatcaaatatatgttaataaaatgcatatggatggaataggtaatctttatcaaaaattagagcagttaaaaaagaaattaactaaagaaggcttttttgatcaaaatcataagaaagtgatacctaaattcccccaaaaaatagctgtgctaacagccggaactggcgctgcaatacgagatattcatacgactattaatagtaggtatccgttagcagaacaagttcagatcaatacacttgttcaaggagaacaagctaaaagcgacattattgaaaaaattaatcaagctgatgctttgaatgttgatacaattattatcggtcgtggcggaggctctatcgaggatttatggaatttcaatgaagaagatgtcgttaaagccatctataattgtcaaacaccgattatttccgcagtaggacatgaaactgattttacattaagtgattttgtggcagatgtaagagcagcaacaccaactcaagcagcagtattggctacgccggaccaatatgaattacgtcaatatttacagcaagctaatttatcattgactcgatttatcaaacaatatatgcagcaaaaacgaaaacatttggaacatgttgcatcttattataaattccaaacgccttcactactttatgatcaacaaatacaaaaacgtgatgatcttgagaaacaacttaagttgtctttgaatttgaaaattaaaaatcagcaacaacaattacagttactctttaacaatttcaatttaaaaacgtttaaacaacgtattaaaagagaccaattaacaaataatcaaaaacgtgttgaattaagtaaagtcatgcataatttacttgataatcaaaaaaacaatcttgctagaaaactagaaaatcttaataatttaagtcctactaatactatgttgcgtggttatacaatcgtaaataaggatgataaagttattaccagtacgaaagacttggctgaaaatgataatattgtgttaacaatgaaagatggctttgttgatgcacaagtaaagaaagtaaggtgtaatgatgagtaatagtaatacacaaagttttgaagaaatgatgaaagaactagaaacaatcgttcaaaaattagacaatgaaaatgtttctttagaagaatctttaaacctatatcaacgtggtatgaaattatcggctacttgtgatgaaacattaaaagatgctgagaaaaaagtaaatgaattgatgtctgatgaaaatactgacaataatgacgatactgagaaggtagatagtgatgatgaataaaaaaatggaacatttaactgaagaagttaatcaattgttatctgaaacaattccaaattcaaaactaaatactaatctagaagaaagtatgcgttattcactagaagcaggtggtaaacgcataagacctgtattattactgttaactttagaaatgttaacagatcagtataaaaaaggattttcatcagcacttgcactagaaatgatacacacatattcattaatacatgatgatttaccaccaatggataatgatgattatcgtagaggtaaattaacaaaccataaagtatttggagagtggaaagcaatactagcaggtgatgcattactaactaaagcatttgatatgattgtaaacgatgattcacttaatgatgttgctaaagttaaattaattaaacgtttatcctttgctagtggccatctgggtatggtaggtggtcaaacgcttgatatgcaaagcgaaggtgcagaaacaaatattgatctagacactttagagaaaattcataatgcaaaaacaggtgcactattaaaatttgcagtcatggcagcagtcgatattgctgaaccagaaaatgaagtttccaatgctttagaatcatatagtgaacatttgggattaatgttccaaatcaaagatgatttattagatatttatggtgatgaagcaaaacttggtaaagctgtcggtagtgatattgaaaatgataaaagtacctatgtttcacttttaggccaacaaggggctgaagacaaattgaaacatcatacagacaaagcttacaaatgtttaaatcaattaccaaaacaatataatactgacaatttagtttatattatagaactttttaataatcgtgaatcataaaatcaaatgtatttatttaagagtctgggacaaaaatggatgtttcagactctttcctacgattagtcaactggttatatagtaaattaagtatactaaataaaccttatgatttaatatttttaaataaggtgttaatctatatttgtaattatgattattttaatgtggggacatttgatagtcatattgcttattattggtaactaaataatgaattgtttttaacaagcgattcatacaagctaccatggcagtcttatgagttttctcatgaggctgctttttaatttatagtaataatcaataatgtgattatcgtaatgtcgctgactccgaattatattcatcacaacgaaaaataacggtctccgtttttttatttccttgttttatttagttttgtactattcaataaatattcagcatacgcataatatgatataagtcatgattgaaatgcttcatatttagaatcactgaaaaagtattgtcaagactataattacaacggaatatccatttaagtaagtaaaattacaaaccgtctttagtagtcgaatgctatggcttgtggtaaaatcaatgtataaatattcgtttatagaggtgctatatatggctaaaaaatcggtaagacatataaaaataagagaaataatttcaaatgaaaaaattgaaacacaagatgaattagtaaagcgattaaatgaatatgaattaaatgttacccaagcgaccgtttctagagacattaaagaactacaacttataaaagttcccacgccagcggggcaatatgtttatagtttaccaaatgatagaaaatatcatcctttagaaaaattgggtcgttatttaattgactcatttgtaaatattgatggaaccggtaatttattagtattaaaaacactaccaggtaatgcgcaatctattggtgcaatattagaccaaatcgattgggaagatgtattaggtacaatttgtggtgacgatacttgtttaattatatgtcgagatgatgctgcaagcgagaagattaaaacacgcatctttaatttattataagtataaggaagtgttaaaaggatgctccaaacgctatctataaaacaatttgcaattattgatgaactcgaagttcattttggtgatggattaactgtcctaagtggtgaaacaggtgctggtaaatcaattataattgatgcaattggtcaattaattggcatgcgtgcttcatctaactatgtacgacatggtgaaaaaaaagctattattgaaggtatttttgatattgatgagagcaaggaagcaatttctatattagaagctctagatattgatatcgacgaagattttcttctagtaaaaagagaaattttcagtactggcaagagtatgtgcagagttaataatcaaatcgtaactctacaagatttacgtaagattatgcaagaattactagatattcacggtcagcacgaaacacagacactattaaaacaaaaatatcatctgcaacttcttgataattatgctgaagacaaatataagaaattactaaattcgtatgtggctacttttgaccagtacaaagccaaaaagaaagaactagaagatttagagtctgcggaccaggctttattacaacgtttagatttgttgaaatttcaacatgaagaattacaagaagcaaatttggttgaaggtgaagttaagcaactcgaaactgatattaaacgtatacaaaattctgaaaacctaaacttagcattaaataatgcacacctcacattaactgatgaacatgcaataacagatcgattatatgaattaagtaatcaattacaatcaattagtcatatattacctgaaaaatatgattcattgaaagaagaggtggatcaattttattacaccttagaagacgctaaacatcagttatatgatgaattaacgaatacagagtttgatgaacaatatttaaatgaactagagtctagaatgaatgtactcaatgatttgaaaagaaaatatggcaaggatattagtgaacttattacttaccaaagtaaactggctaatgaaattgataaaattgagaattatgaagaaagtacctctcaattaagacaagaaattgatactttatacgataaagtaattaaattaggtgaacaattatctaaagagcgacgtagtgttgcacaaacattaagaaatcatattgtagaagaaattcaaaacttacaaatgaaagatgctaacctagaaatttcattcaaaccactagatgttccaaaccgtgaaggtattgaatttgttgaatttttaattagtcctaataaaggtgagccacttaaaagtttaaacaaaatcgcatctggaggcgaattatctagaattatgttggcgcttaaaaccatttttgtcaaagcaagaggtcaaacagcaatattatttgatgaggttgattctggcgtttctggtaaagctgcacaaaaaatggcagaaaaaatgaaagacttagctacttatattcaagttatatgtatttcacatttaccacaagtagcaacgatgagtgaccaccatctatttataagcaaagacactacagatgaccgtacaactacacatgtacaacaattatctggcgatgaacgtgtaacggaaatagcaaggatgatatctggcgcaagcgttacagaactcacacgtcaaaatgcgaaagaaatgattgagcaaaaccaacgtttacgtgaataagcaaaatgtaatttcttattttataaaaattatttttataaaataagaaaggtgttgattttcatgcaatatcaacatttaattgagcctaaaaaagtgttaaaggtgatgttgccattttatttgccaacgatgaaaaaatgttatctgtagttatagatgcattatcgctaacagatattgatgtttatctctatgatacgcaagaccctaccgaaattatccgatcatttgacgtcgaagtacaaagattaaatagaattcatatcctaacatttgaggatgagaacaaattatttcaacagtgtgcacatgatttagctactggtaaagcgtctttattaatgaagggaaatattgtgtcttcaactttattaacatttgtattaggcaataaaaattttgttgattatcatggttttttaaatcacgtagcatgttttcacatccctaattatcacaaaacgcttatgctgagcgattcagcttttaatattagtcctacaattgaagagaagaaacaaataattaataatttatcaaaatttgcaatgtcactaggttatgaaaaatttaaaattgccttgctttcgtctgtagaaaaaccaattaaaaaaatacaatcttctttggatgctgtgaaattaaagcaaattttcagtcggaaacaatcggaatttttattcgttgatggtccttttgtatttgaaaatgcaattagtatgcaaaacgtgattaagaaaaatattaaatcgtcggttgcaggagacaccgacgcattactcgtttcacatattgatgttggtaatgcattgtataaatcatttacttatttcggagaagcacgcgttgcaagtttaatattaggggcaaaatttccaatcgtattaacatctcgttcagatacaaagcaaaataaattagactccttacttttagcgctaaaagtgttaaactaacgtaatttttctattgaagtgtcatattatatttttcgggataggttattaattttataatgcctttaattgatgtaaaatataaatggatatcataaattggttaatattaccgtagttttgaaaacttaaaacttgaattcatgtagcattaatcaatattttcactttaaatgaaccaaggtattccgtataacattaaaaattaaattacagttgtgtttatgatatggggacgtcctgacattctatttaacgcaagttgatcattcgcctaaaatttttaaatatggtgtacatgtagcgaaactgagtggtattattatttatggttttagatgttcattaatgatgttttttaccgatgcgcttatagtaattgaggcattaatgattataacgataggaagacatcttagggaaaagaatgccgacattttcacgtattaatttcaaaagtgtttgcttgattaaaaggtaatgtttatttaaagatttaatcttgatatcactattattgacatacttttttgaaattgtattacagttggttcataaaaaattgaaaatatattcgataacgatgattaattatctagtacatgacttttaaatgtatgtagcgggaatgttcaaaaaccagatgatacaattacaattttacacttaaagaaatgaatcactttttaagtaaaaaggtggtttcattagtgtgttctaaacaattgattgaatactactaatcaactgaataagtatctaagccatataattaatatattttcgatatatgagtgagtcaaaaggtgaaaatcattacatggagttacataggcgtattaagctgaaatgagtcgaatggtttacatgaagcattaaaatttaaagaacagggtttagaaaaatttaaaatcttagtttcttggattacaatagaacctatttatccaggttacagcgcaaaggcaactatggcaataggtacatgaatagtattaacaatagctgaaattgatgaggtttatagttaggagcaaaaaaatgtcagaagaaaaatatgatttagtgatactaggtggaggcactgcaggttatgtatctgcaattagagcatcacagctaggaaaaaaagtggcacttgtagagcaatcgcttttaggtggaacttgtttacataaaggatgcataccgacaaaagcattattaaaatccgcagaagttatgaggacaatatccaatgctactgattatggtgtggatgtggataactttagagttaacttttctcagatgcaatcaagaaaaaatgatatcgtcaatcagatgtttaatggtgtaacacatttgatggaacataataaaattgatgtgtttaatggcgttggccgtatattaggcccttctatattttcacctcaaagtggtacagtatctgtagaatttgaaaatggtgaatcagaattaatacctaataacaatgtacttatcgctactggatcacaaccaatggacttaccatttttgccgtttgatcataaaattgtcttatctagtgatgacatcttaaaattagaagcgttacctaaatcactagccattattggcgggggtgttataggtttagaatttgcgtctttaatgactgatttgggagtagacataacagtcatcgaagcaggagaacgtattttacctactgaaagtaaatcaattgccaatacattaaagaaagaattaacacaacgcggtgtttcgttttatgaaaatacacaacttactgaatcgcaaattacaattgaagcaacaagtattgatattaaattaaatgaagaagtcactcattttgaaaaagctttagtggcaattggtcgcaaaccaaatactgaagatattggcttaaataacacaaaaataaaattgtctaatagcaatcatattatcgtcaatgaattccaacaaacagaggacaaacatatatatgcagcaggtgattgcattggaaagttacaacttgctcatgtaggttctaaagaaggtactacagcaattgaacatatgtttgataaatcacctttatcattggattataataagatgccaaaatgtgtgtacacacaacctgaagtagcgagtatgggacaaaatctagaacaagcaaaagcgaataacttaaatgcaaaagctattaaagtgccgtttaaagcgattggtaaggcagttattgaaaatgttacaaatcaaaatggcttttgtgaaatcgtaatcgatcaagataatgatactgtacttggcttaaatatgattgggcctcacgtaacagaattaattaacgaagtgtcattgttgcaatttatgaatggatcaactttagaacttggattaacaacacatgcccatccatcactttcagaagtgttaatggaactaggcttaaaagttgaaaacagatcgattcacgtttaattaaggaggaaataagatgtttgattataaatcggttggacttgaagcgtccgacttacaaacgatgtataaatggatggacttaggtcgtaaaatagatgagcgcatgtggttattaaatcgcgcagggaagattccatttgtcattagttgtcaaggacaagaagctactcaaattgggatggcatatgctatgcgtgaaggtgatatatcttcaccttattacagagacttagcatttgtaacttatatgggtatgacagcattagactcaatgttggctgcatttggtaaacgtgatgatataaactctggtggtaaacaaatgccttctcattttgggaaaagagaaaaaggtatattatcacagagttcacctgttgggacacaaattgtacatgctgtaggtgcagcgttagctttaaaaatggataaaaaaccaaatattgcaatggcaacggttggtgaaggtagttcgaaccaaggtgattttcatgaaggccttaactttgctggtgtccacaatcttccttttatttgtgtaatagaaaataataaatatgccatatctgttcctgattctttgcaatatggtgctgaaaaattatctgaccgtgccattggttatggtatgcacggggaacatgttgacggtaatgatcccattgcaatgtacaaagtgatgaaagaagcgcgtgaacgtgcattgaatggtgaaggttcaacacttattgaagctatgtgtactagaatgactgcgcactcatcagatgatgatgacaagtatcgtactcaagaagaacgagatggtttaaaatctttagactgtaacctcaaatttaaaacatttctgcttgaagaaggtattatcgatgaagcatggttagaaaaaatcgaaacggaacataaagaaatcgtaaaccaagcaacaaaagaggctgaaaaagcaccttatccatctccagaagaaacttacactcacgtttacgaagaagggagctcaatcaatgcctaaattaagctatttagaagcaattcaacaaggattagatcaagccatggctaaggatgatgacgtattcgtcttaggtgaagatgttggtaaaaaaggcggtgtatttggtgttactttaggtttacaacaaaaatatggtgaagcacgtgttttagatacaccacttgcagaatctaatattgttggtactagtattggcgcggcgatgttaggtaaacgaccagttgcagagattcaattcgctgaatatattttaccagccacaaatcaaattatgagtgaagctgcaaaaatgagataccgttcaaataatgattggcattgtccgattacgattcgctctccatttggtggtggcatacacggtgcgctttatcattcacaaagtgtcgaatctatttttgctaacacacctggtctaacaatcgtaattccttctacaccttacgatgcaaaagggcttttactgtcatcaatagagtctaatgacccagtgttatatttcgaacacaaaaaagcttatcggttattaaaagaggaagtccctgaatcttattatacggtgccaattggtaaagctgatgttaaacgtgaaggtgatgatattacagtattcacttatggactttgtgtgaattattgtattcaagcagctgatatgcttgctgaagatgatatcaatgttgaagtagttgatttacgtacagtgtatccattagataaagaaacgattattgaaagagccaaattaactggtaaagtgttgttagttactgaagataatcttgaaggtagtgtcatttctgaagttgctgccattattgcagaaaattgtttattcgatttagacgcaccaattatgagacttgctggacctgatgttccttctatgccattcgcaccaccacttgaagatgagtttatgattaatccagataagataaaaattaaaatgcgtgaactcgcagaattctaaggaggcactataatggaaataaaaatgcctaaactcggtgaaagtgtgcatgaaggcacaatagaacagtggttagtttcagtaggcgataaagttgaagaatatgatccactatgcgaagttattactgataaagtaactgcagaagtaccttcatcatacgccggcacaattcgtgaaataatcgtaaatgaaggtactactgttgctgttgacgaagtcatttgcatattagatgcagacgaccaaacacttgaaactgccactgaaaatgagacagaatcagaaacacaagataatacatcaaatgaagatattgaaaaagatcatcaggatagtgaattaacaaatcaatctgctaatgctcaaagtagtgaagctaaaaataatggtcgttattctccagttgtatttaaattagcttctgaaaatgatatcgatttatcgcaagttgttggtactggtttcgaaggtcgtgtaactaaaaaagatattgaaaaagcaatcaaagaaggtacaagtaaaacgtcttctaatatcatttcacctaaagattcgcctaaagtttctaaacaagcagtatataatgaaccatcacctggttcatctatacctgtaaatggcgttcgtaaacaaatcgcgcaaaatatggtcaatagtgtaaatgaaataccacatgcatggatgatggtagaagcagatggcactaacttagtaaaaacgcgaaattatcataagcaaagttttaaagaaagtgaaggttacaacttaacatttttcgcattcttcgttaaagctgtggctgaaggattaaaagcatatccattacttaatagtagttggcaagattcagaaatcgttatgcataaagatgtgaatatctcgattgctgtggcagatgaagataaattatatgtgccagtgattaaaaatgctgatgaaaaatcaattaaaggtattgctagagaaataaatgagttagcacaaaaagctagaaataaaaaattacgctcagaagatatgcaaggtggaacattcactgtaaataatactggaacatttggttcagtttcatcaatgggtatcatcaatcaccctcaagcggcgatactacaaattgaatcagttattaaaaaaccagttgttattgatgatatgatagctattcgtaatatggtcaatttatgtatttcaattgatcaccgtatcttagatggcttacaggctggtagatttatgaatttcgttaaaacacgtattgaacaatattcaatagaacatacgagcatttattaatatataaaataattgaccaatgttagataagagtataatcatgtgatatcaaacttaatgttatatatcatgtgattgtgctttttttatatcattaattaaatgaacaggtttgatttaaaatgattatttaaatattaggaaatgatacaatataacgcacacctgttgaagtattctatatatattagtagaataaaagtattaatctagaaatgaagggtgaagttgattatggacttaaattttgatttatatatgacagacgttgttaatcaagctagaaatgaaattgaagaagctggttatgaacaattaactagtgcagatgaagtggataatgtattaaaacaagaaggcacttctttagtaatggtcaattctgtatgtggttgcgcaggcggtattgctagaccagcagcaacacatgctttacattatgataaattacctgatcgtttagtaacagtatttgcgggtcaagataaggaagcaactcaacgtgctagagattactttgaaggttatgcaccatcaagtccttcattcgcattgattaaagatggtaaagtaactgaaatgatagaaagacatcaaatagaaggtcatgacgtaatgaacgtcatcacacaattacaaaatttattcgataattattgtgtcgaaaaatagaggcgtgaaaaatgattagtttaaatccctatagaattggatttagaacaattaaaactgctgttggaatggcgcttggtatcattattgccaaattaattggccttgataattttgcttcaagcgctattttagttgttttatgcattaagcatacgaaagtacattcactacaagccattgtatcacgctttgtatcttgctttatgattttaatatttggctctattgctttcaggcttttagggcaacatgcaatcgtattaggcatcatcgtattgttttttataccactaactgtggtatttaaagttcaagaaggcgtggtaacaagttgtgttattttattacatgtgttcaatgctcaaacaatcgatttacatttatttataaatgaaattttattgctcgttgtcggattaggaatagcttttttaatgaatagtattatgcctagtttagatagcaatttaaagcattataaacaacaaattgaacaacagttcacagcaatttttgaaacatttagcgaaacatgtcaaaaaactaatatatcgattgatatttctttcaaacaattaaaattcacgattcgtaaagcaaaatctattgcgtttagagatgttaaaaaccattttgttagaaacgaaaactcttattatcattattttgatatgagagaagaacaattagaattattgcatcgtatggctttaattatagaaaatattgaaacaaaggactgtatgttaactaagatttctaatttatttgccgaagtagctacgaatgtaaatagcaatgactatactgcattacgtttacattctttatatgaaataagattagaactgaatgaggcagagttacccacaacacacgaatcatttagaacgagagcaagtttattacaattattaaatgaattagaagcctatttggctgttaaatcacaattcggttcattaaggttacatagcgatcaaaaagttaccatttaaacaaatcaatgaaacagaccgggacaacaatttgtctcggcctgtttcattgatttgaggtataagtaactaaattgatgatatttttaatatgcttttctaatagcaaattactacgctcatataattcaaatgagatttgagtaaagatcatactcatgtttcagtcattttaaatgcgattattaaattatattacttacacacatttattaatacattaacgattaatttactaatggcacgacgctcgtcaagattaatgcaagaacgacagctattaacataactacgataataactcttaatactttattattattcaaaattattcctccaacttatctaatttcatcaatatcatgcacataattaaatacgcatcaatatatatttatatacatattatatcacatagcatctacatacgttgaatcatattagttttactgctctatataattcgttaaactgaactataagacatataaatattagaatggggaattatagatgattaacgaacaacgacttttagacacattcttagaattaatccaaataaattctgagagtggtaatgaacaaatgattcaatcacatctcaaatcacaatttgaatcattaggattattagttcaagaagataatgctagtaaaaatgaaaatttaggtgctaacaatttgatttgcactttacctgctacatcaaatttagatcatatagataaaatttattttactagtcatatggatactgttgtccccggtttaaatgtaaaacctcaaattaaagatgatggatacatatattctgatggaactacaattttaggtgctgatgataaagcagggttagctgctattttagaatgtataaacgttttaaaagaacaaaacatacctcatggtcaaatccaattcgttattactgttagtgaagaatcaggacttgagggtgcaaaaacattagatcaaaccttattagatgccaattatggatatgctattgatgccagtgttggcgtaggtacaactgtgacacatgcgcccactcaaatgaaagtaaatgctacaatctatggaaagagcgcacatgcgagtaccccaagtaaaggcgtaagcgcgattaatatagcagctaaagcagtaagtgaaatgaaattaggacaaatagacgactatactactgcaaatattggacgatttgaaggtggctctgctacaaatattgttgcagataaagttacacttaaagctgaagcacgctctcattcagataaaagtattgaatctcaagtacagcatatgaaaacagtgtttgaagaaacggcagaaaaatatggatgtacttctgaagttgaaatcattaagagctatcctggttttaaaattcatgacgaagctacagtaactcaagtagcaaaggcaagtgcaactgcattaggcttaaaacctaacactgtgctggcaggtggagggtcagatggtaatatcattaatcaattgggaattcctactgttattttaggcgtaggttatgaaaacattcacacagctgaagaacgcatgccaataaattctttaaatttattaacaaaacaattacttaaaattgtagaaataattactcaacaatctacgaactgattaagtgattattattatcgctttgtgatacaatatactagaaaacttaaataagagaggttagttaaatgacacaacaaattggtgtagtaggtttagccgtaatgggtaaaaaccttgcttggaatattgaatctcgtggatatagtgtttcagtatttaatcgttcttcagaaaaaactgatgaaatggttaaggaatctgaaggaaaaaacatacatccaacatactctatagaagaatttgttaattctctagaaaaaccacgtaaaattttattaatggttaaagctggtccagcaacagatgcaacaattgatagcttattaccattattagacaatgatgatatattaattgatggtggtaatacaaactatcaagatacaatcagacgaaataaagcacttgctgaaagtggcgttaactttatcggcatgggtgtatcaggcggagaagttggcgcgttaactggtccttcattaatgcctggtggtcaagaggctgcttttgataaagtaagtgacatattagaatctatctctgctaaagctgatgatggtgcagcttgtgtagcttacattggaccaaatggcgctggacactacgtcaaaatggtccacaatggtattgaatatgcagacatgcaattaattgctgaaagttatgcaatgatgaaagatttacttggtatgtctcatgaagaaatttctcaaacatttaaagattggaacgctggcgaattatcaagttatctaattgaaatcactggtgatatctttacaaaattagatgataacgctgatgatgctttagttgaaaaaatactagatacagctggtcaaaaaggtactggtaaatggacttcaattaacgctttagaattaggtattccattaacaattattactgaatcagtatttgcgcgtttcatttcatcaattaaagaagaacgtgtaaatgcttcaaaacaattaaatggacctaacgctaaattcgaaggtaataaagatgaattcttagaaaaaattcgtaaagcactatatatgagtaaaatttgttcatatgcacaaggctttgctcaaatgagaaaagcaagtgaagataacgaatggaacctcaaattaggcgaattagccatgatttggcgtgaaggttgtattattcgtgcgcaattcttacaaaaaattaaagaagcttatgataatgatactgagttacaaaacttattattagatccatatttcaaagatattgtaactaattatcaagacgcattacgtgatgttgttgcaactggtgtacaaaatggtgttccaacacctggtttctctgcaagtattaactattatgacagttatcgttcagaaaacttaccagctaacttaattcaagcacaacgtgattattttggagcacatacttatgaacgtaaagaccgtgaaggtgtcttccatacacaatggattgaagaataatacgattttaaaattctaattgtatttgtatcatagaggagtccaagacattattgtttaaataataatgtcttggctctttttttatatgctagtggattttagagaaagaaaaaatattttcgcgcaaacgtttgcacaaatcttttgactttggtttatattttctttattatttattttagaaagagaaagcgctttattagttaattaaaggatgtcgttatattggtaactataaaggatattgcaaatgcagcaaacgtgtctccttctactgtttcccgtgtgattagtggtaatagtcgcataagtgtagccacacaggaaaaagtgaaaaaaataatggctgattttaattaccagccaaaccatgctgcaagaacgctcataacaaaaaaatcaaaaacaattggtattattcaaaagcaaggtgacaaagcaacaagacaaaatccatttattatagaagtattgtctggtgtttatattgaatgtaaataccatgattatgcaaccatatctacaacaggtgagcaaactagtgaaatcatagctgaagtaaaacatatgattcagtctcatgcagttgaaggatttatattgctttattcaaaagaaaacgacgagattgctaatttattaaaacaacatgccataccctatgttgttataggtaaaccaatcaacaatgaaaatgtggtacatatagataatgataatattttggcatcacaattattaacgcgctatttaatagatttaggacataaaacgtttctatttttagcggagatgggtgattatgaggtagtgaaagatcgcattaaaggttataaacaaacattgaaggttgctaatttaaaaccgagtataatgtttacagatttgagtcgccaacaaattataaatcacttaaaggcgcttgttactgaaaacgctttaccaactatcattattacctccgacactatgcttaatcaactcgttttaagtgcactatatgaattgaatattactattcctgaagacatacaaactgcaacttttaatgactcatatatatcagcatacgcagcaccaccacaaactgctgtagatattcaacctcaattactaggtaaagctgcaggtgaaagtattattaaattagtaaaagatagccacattgaatatatgaataaaatcataccaacgcatatcattaatcgttgctcaaccaaaaaattttaggaggaaacattatgaataaacaatggtggaaagaagctgtcgcatatcaagtttatccaagaagctttaatgactcaaacaacgatggtatcggtgacttaccgggtgttatagaaaagttggattatttaaaggacttaggtatcgatgttatttggttaagcccaatgtataaatcaccaaatgatgataacggatatgatattagtgattataaagatattatggatgaatttggtacgatgcatgattttaatcaattactagaaggtgcacataaacgtggcatgaaattaatccttgatcttgttgttaatcatacttcagatgaacatccttggttcattgaatcaaaatcaagcaaagacaaccccaagcgagattggtacatctggaaaaagccaaaatcagatggttctgaaccaaataattgggaaagcatatttaatggttcaacttgggaatttgatgagcaaactcaagaatattatttccatttgtttagtaaaaaacaacctgatttaaactgggataatccagcagttcgtaatgaaatatttgatatgatgaattggtggtttgaaaaaggaattgatggttttagagtagatgcaattacacatataaaaaaatcattcgaggctggagatttatccgtacctgaaggtaaaacatatgcaccggcatttgatgttgatatgaatcaacctggcattcaaacatggttacaggaaatgaaagataaatcactaagtcagtataatattatgactgtaggcgaagccaatggtgttaatccagataatgcagaggattgggtaggggaagataaaggcaaatttaacatgatattccaattcgaacatttaggtttatggaacaccggtgacgtaaaatttgatgtaaaatcatacaaaactatattaaatagatggcaaaagaaactagaaaatgtaggttggaatgcgttatttatagaaaatcatgatcaacctagacgtgtatctacatggggagatgacaaaacgtattggtatgaatctgcaacaagccatgcaattgtttatttcttacaacaaggcaccccatttatttatcaaggacaggaaataggtatgacaaattatccatttgaaagcatcgagacttttaatgatgtcgccgtagttaatgaatacaatattgtaaaagcgcaaaatggtgatacgtctgcattattagaaaaacataaaatggaaaatagagataattcaagaacgcctatgcaatggaaccaaaataaaaatgctggattttcagatcatcaaccgtggttcccagtaaatcctaattatcaacaaatcaatgttgctgaacaacaagataatccaaattcaatactcaatttttataaagcaatgattcaattgaaaaaatctgatgatgtctacacatatggtaaatttgatcttgttgatacaactaatgaacaagtattcgcatatacaagaacattagatgataagcatatcttaattgtcggtaatcttactgatcaaataacatctttaaatatgcctgattatatgtccaatcatagcaatcatattttacttcataactataaagaccgcgctattaacatgaatgcattacgaccttttgaagcatttgtccttgatttaacaaacaaataaaaataaaccgagcctacaaacgtctcagcttagccaatagatagacccaccacaataatgagtggtgggtctatctatttatattttatcggtctgtttcatcataatctaagtattgttcttgatctacaggcatccataattgaattttacaaaatgaatcatcaaatgagatatcaaatggatatacttcaacgtaaagactattgtgttcataaggtaaagtcatttgtaagcttgtttctatataataccatgcctcattcacaacatagtctaactcaccttgtagattaaattttgcatattgcctttctggaagatatctactttctaaatgagacggatacctttcactaggcacaccaacaaatatttccataccttcatctagcggacaatttactacaaacaattcatgtgggctaatatcattgtaacgttgtagctccttgatttttccatcttccattaagtcctcaagaaaatctggtaccttaaaaggattctctaaatgttctgaatcgataaattgtgcataaccaactaaagctatgcccgctgcatcctctaaacgatatgcattgggcggtttttctgttgttgttaatttaatatataaacgtggttgcatctttagctcttcacgttttgtgttgacttgaataggtgaaaccccgtgaaagtcactaaaatcatttgcaaaagcatttgtgtcactgtaatgatattttttagcaatatccattaatcgactagatccacttataatttcattcgctgctaatgtcattctacgagacctagcatattctgtcggagattgaccaacaatcattttaaacgattgatcgaggtgatatggtgaaagaccaacgtaatcactgagtgcttgcaaatgaaaaggcactaataaatgatcttctatataaacaattgcctgttgtatttgcttgataacgtccaaaactttcactcctaaactagattttccattcaaataaaaaaccataaactatctactgatagagcacgaatcaaattcacaacgaatcacttttctcacgaagtaaccctctatatttatcagccgatgtatcaactgaataacacaaaaaacatatgatcccgtgttttactactcttaaaaaatgactacataatataatatgtttttaactgattaagtatattctacatcattttcattccgcttacatcttaaaaatattaaatagggtaaaatgtaaataagttatttggcattcactttttttactcaatagcttaaatcataacataaaaaatagttaacaaaaaagcatcaacattgtaaagttacaaatgttgatgctcgtatgattagcaatatattatttaatgaatatcgtcccaccatttgaaaccatctctacttaataataaatcactatcaagcggaccattagaacctgactcataattaggaaactctggttcattttgattccattcttcttgaattgcatctacaaacttccatgtcgattttaattcttcccaatgtgtaaagtttgtagcatcaccatttaagcaatcaaacaataagttttcatatgcatcgactgtgttcattttatcttgtgcactcattgcatatgataattgaacaggttctgtctctatgccttgtacatttttcttagcatttaagtgtaatgacacaccttcattaggctgaatattgattacaagtaagtttgagtctaattttttatcagtttcataatacaagttcattggcacttctttaaattcaacaacaacttgtattgttttactcttcatacgtttaccagttctaatataaaaaggtacgcctgcccatctaaagttatcgatcgttaatttacctgctacgaaagtaggggtagtagaattttcagcaacacgatcttcatctctatattttggtactttttgaccttggattacaccttcatcatattgaccacggacaaagttctgtctcacttcttctggttctaattttcgtaatgatttaagcgcttttactttttctgctctaatatcttcactgtgtaaactgataggcgcttccatagcaagtagggcaaccatttgtagcatatggttttgtaccatatcttttaatgcaccacttgattcataataaccacctctatcttctacacctaatacttcagaagatgttacttggatattggaaatatatttgttattccatagtggttcgaacattgcgttagcaaaacgtagcacttcgatattttgtaccatatctttacctaagtaatgatcaatacgataaatttcttcttctttaaatgaacgacgtaattgttcatttaaatcttcagcagaggctaaatcagagccaaatggtttttcgatgactaaacgtttgaaaccagtcgtttctgttaatccagatgattttaaataatcagaaattacaccaaagaattttggcgccatagctaaatagaacaatctattaccatttaaattaaattcagtgtctagtttattactaacttctagtaatgattgatagcttgcttcgtcacttacatcgtgtttatgataaaatacatgttccataaatttatcaagatgcttcgtgtctttaacatgttcttgaatagatgatttcacttgactacgaaaatcatcatttgttaactctcttcgacctataccaattatagcaacttgttcatttaaattttcttgttgatatagatggaacaatgatgggaataattttctgtgacttaaatcacccgttgctccgaatattgttattaagcatggaatgtctttatttttagtattcaagatcaaaacctcaattctttttataaatctctttatattatagaacaataatctgtttagttcatacctttttgcttgagagaagaaaattttaatatattttttattcttttctatgataaaatgtgaacaagaagaggaggcatatgcatggaaatcacattttttggtacgagtgctggtctaccaacaaaagaacgaaatacacaagcaattgcattaaacttggaaccatattctaataatatctggctatttgatgtcggtgaaggtacacaacaccaaatattgcatcattctattaaattaggaaaggtagatcacatttttataacgcatatgcatggagaccatatttttgggttaccaggattattaacgagtaggtcgtttcaaggtggtgaaggtaagccactaacactcattggacctaaaggaattaaagcatatatagaaacgactttacgtttatctgaatctaaattaaattatccaattacatatatagaaatcgaaaaccacttatcctatcaaaataatggttttaatgtagaagcgcatatgttaaatcacggtataccttctttcggatatcgtatcgaagcaccttatacatctggaaaaatagatgtatcggcgcttaaagaaattgggttagagcctgggcctaaatatcaagatgtaaaaaataatgaaacatttgaatataatggcattatttataattccaaagattttaaaggggatgctgtgaaaggacctgttatcgctatatttggtgatacaatgccgtgtcaaaatgaagaaatcatcgccgatcatgctaatgttatggttcatgaaagtacttatatagaaggtgataaatcattagcaaacaattatcatcatagccatattgaggatgtatttacactaatagaaaatgcccacgtagattatagcttgattacacacatgagtaatcgttacacaattgaagaagttgaaacgattagtaaatcactcaaatcacttcccactacacctccatttaaatttgtgaaagattttgattcgtggtctttttaaaacttgcttataataatgaatatagtggaaattaaaatcccatatataaaataccctttaaagtgaaatttttagaacttctactttaaagggtgtttataattttatgaaaaaacatgtttctatttattattgttgtaaaatgtcagtccttaatcttcatcctggcttgaaagttcaacgctacgatccactgcagctctcaaacaatcctcaaaaacactttctaagtcatgttgtgaaagggcatttaatcctgcttgagtagtgccacctttagatgtgatgttttttctaagttgttccatgcttaattcagaacgttcaatcattttacttgttccaataattaagtttcgaatcgattcttcgacttgtgctttttccaaacctaagcgtgtaccagctgtaacatattgctcgaatacatggtataaaaatgctggaccacttcctgtaatggctgtcacttgatgtaaattatcctctggaacctctattgctgaaccaaaggcattaattaattcatcgacttcgtctttagaatttggaccaaaattacttgaaaaactaattccagtaactgaatgacctacatgtgcattggtatttggcataatacgtgcaattggattgtccgcttccaatttttctcttatataactaatgggtaaaccagccatgatagagataaatttatttttgtctgttataaatggtttaattctttctgctaatgattcgaaatcataaggtttagttcctaaaaatacataatctgccgcttttaataacgcttcatcatcataactataattgacacctaacttttcagcatattctttaagtgcaacttcattagaacgatttgttaaataaatatcattggaatctataactttagaattaacgatacctgtaaaaattgcatgtgccatattaccagcaccataaaatactagtttcatgtgaacatttcacttcctctgagtttttatgtttcatttatgtatctatagtaacatagtttcacaatatgcctaatatttccataataaatggcataacgtaatgacttcatatatactatccatatattaacaaagggtagggatacatatgataggtagacattatgtcttaacaggcgcatcaagtggattaggtaaatctatcttacacattctattacaaaaacaggtctatgtgactgcactggtacgtgacgttaataagctaaagccgcttcaattaaaatatggctcctcacatttaaagattatccaatgtgatttacagtccacatcgcaaatcgtccaacttagcaaccattttaaaggacaatccatcgatggtatcatctatagttctgggttaggttatttcaaatcaattaatcaacacacaatagaagaaatgcaagaaacatatatgttaaatgtaattagctttaattcattattaactacattacaaccacatttcagtcgcatgcctacaatcgtaggcattggaagtcagtctgcatttttgacacaagcttctgctgcccattacggtgctagtaaagctgcatttaatcaagtactaaatgcactccgtattgaaaaacccaattaccatgtactaacagttaatacaggaccaatagcaacaccattccatgaaaaagcagatccttcattaacatattcaaaaaaatataaaaaaatcatgctaaactccgataaattagcacaacgtattgttaatgcgataatcactcaaaaagaagaaattaatgcaccaagttggttgcatcatctcttacgtatctatcagttagcacctcgatttattgaaaagcacttcacttttttatttaataacaaatcttaatcaatatgagtggttatataatattaaaagcgtatgagtaagattaaataggatacagtttagttcactttcctatctaaaataactcatacgctttaattggttaacttattttaaatgttgcgtgtattctaaatttttaacgcgatcacgtgctgctttcaatttttctaagctgatatctttagacagtttataattttcaacattttcatccagttgattcacactacttgcccctacaatgattgaacctaacgcatcatgagaggttaagtaattaaatgttaaactggatagattgctttcgatttctttaatagatgcaacagtttcgcctaattcaggatatgtgtaatcaaaaataccttctgaaaacttacgatctaaggcttgattactgttagaagttaacaatcctttaaaaactggaccacgagctaaaactttcacttttttagcatgtacatcatctaataacgcttccggtctattatctattaaattaaattgagacatgagtgtttcaatatcactatgttttaaataataatcgataacattgggtctaattgaagaaataccatatgctcggacgatgccttcttgtttcaattcatcgaatgcagcaatcgtttcatctagaggatcatctatcgttccaccatgtaattgatacaagtctaaatggtcaagtcctaagcgacttaatgaaccttttactgcttctttaatgtaagctttcgaagggtcccaaaacgtagaaccatcatcagctaaatgatttcctactttagtaccaatgacgatgtcacttctatcttgatattttttaagtgtttttcctacaatatcttcatttacacctttatcatatatatctgctgtatcaaagtaagtaataccatgttctattgcacgttctataattggttcagcttggttaatatctgtgcctaaactcatacaacctaatcctaattctgagagttcaataccactttttaaaacatttttttgcatgtcgtttctcctttcgatacactcaaatcatagggattaaaaataattttactaaatacgacttattagtcatttgaaatacttattttaattgctccctatatactaacgtatttatcttaacagtaacttaaatcaaattaaaggaacgtgattaaaatgaatttatatgagaaaacaatacataaagaatccatttataaaggcgcaattattgatttagaagtccacgatgttgaattacccgatggcaacacatctaaacgtgaattagtttatcataatggggcagtcgcagtttgtccggtgacacctgaaaacaaagtcatcttagtaaaacaatttcgtaaaccagctgaaaagccattattagaaattccagcaggcaaattagaaaaaggcgaagcacggctttctgcagctaagcgtgaattagaagaagaaacaggttatatagctgaagagttagaactaattacagaaatgtacggttctccgggtttttcaaatgagaaaatttccatatatatggctaatagtttaaaagttggagaaatgcatctcgatgatgatgaatttattgaattagtatattacgatgtagacgacattaaagatatgttaaaaaataagtatttcgaagatgctaaaacgattattgcattacaacatttactccttaattataatgattataaataagaagcaagttgacttgcgtattttatcaattactggtattttatatataaatcattatgtaaattaaaatgattataattattagtaggggagtgaggcttccgtggaagaacgtttaaatcgcgtgaagcaacaattacaacaatcttcatataaattgacacctcaacgagaagctacgttgcgtgttttaattgaaaatgaaaaagatcatttaagtgctgaagatgtttatttaaaagtgaaggacaaagcacctgaaataggtctagcaacagtatatcgtacgttagagctattatcagaattaaaagttgttgataaaattaatttcggagatggcgtcgctcgttttgatttacgtaaagaaggcgcaaaacattttcaccaccaccttgtttgtatggaatgtggcaaagtagaagaaattgaagaagacttattgccacaagttgaagaacgtgtcgaaaatgattttaattttagaatttctgatcatcgtttgacattccatggtgtatgttctgattgccaggcattgggtaaataactcagctacgtacaccattttaaagatagaggtggtatcttggatacgattattgaagaatatttgaaattcattcaattagaaaaaggattaagctcgaatacaataggagcttatcggagagatttaaaaaaatataatacttttttagagttacaaaagattagtcatattgattttattgatagagcatccattcaacaatgtctggggtatttacatgataatggcgcttctgctaaatcgttagcacggtttatttcaacaattagaagttttcatcaatttgcgttgagagaaaagtatgctgcaaaagatccaactgtacttatcgagacacccaaatatgatcgcaaattacctgatgtattagaaataaatgaagtgttagcactattggaaacgcccaatttggctaaaataaatgggtatcgagatcgcacaatgctagagttattatatgcgacaggcatgcgtgtttctgagctcatccaaattgagttagaagatgtaaatttaattatgggctttgtcaaagtatttggaaaaggtaataaagagcgtattgtacctttaggtgacacagtaatagaatatttaaagacatacatagaaaccattcgtcctcaattgttgaagaaaacagtgacgaataccttatttctaaatatgcatggcaaacctttatcaagacaagctatatggaaaatgattaaacaaaacgctatcaaagctaatatcacaaaatcattaacaccacatacattgagacattcatttgccacgcatttactagaaaatggggcagatttacgtgcagttcaagaaatgttaggacattctgatatatctaccacacaattgtatacacatgtatccaaatcacaaattagaaaaatgtataatgaatttcatccacgtgcataaacacagacaagttgattcgttgaatactcgcctgtgtttttatatgcaaacaattggtttagtacttttattttctttcttgttgtttttgatataatgcgtttaaacgagcttcattcacttctgttctatctctttctaaatgatgattaacaatgtaactatctctaataacatattccgtcatgatatagtttggatacgttgttaaaattttttgttgcatttgtgaagtgattggtaactgtactggtgcaaatttttgaccattttcaatagcatgtactaattcagcaatcactttttggtatgctttgatatcaatacctagattgatttcttctttgtaaggttcaataacttttaatgcttttctaaaagatttgatagcacctttatcattttctctacgaaagtgataacatccagttgcaaataaaattaaactgacgacagcgtcatccttactgaaagatttattttccttccaagcttcctctaaaatgtcgtgacataaaaagtaatgttgattcgtatgaaattgaaaataaaattcctttaatgcattttccataaaaaatcgctccaaatttaaatgttttcattaaacatgctataatactttagtgaattacgcacttaacttgcgatatgaggtagataaaatgtacgaagtaaaactagatgcctttaatggaccattagatttattattgcatcttatacaaaaaattgaaattgatatttatgatattcctatgaaagcattaactgagcagtatatgcaatatatacatacgatgaatcaattagaaattaatattgctagtgaatacttagtcatggcttcagaattattgatgataaaaagtaaaatgcttctacctcaaacgaatgaagtggaagatttagatgatgatccacgagacgaattggtggatcgtttaatcgaatatcaaaattataaagcctacactgaatttttaaatgaacgtaaagtcgaacgtgctttatatttttctaaacatccaacggatttatcccatttagaatccaatgaaacatggagcccagataatacaattgatttaacagaattaatcattgcctatcaaaaagtaaaaaacagagttgagttccatacacctaaaacagtagatatacgtaaagaaacattcacaatacaacaagcaacttcacaagtcactgataaattaaagcagcatgagtcctttaacttctttagcttatttaattttacagaaccgatagaaatggtagtgacacatttcttagctatacttgaaatgtcgaaatccggtatagtaaatattgaacaagcaaaaagttttgatgatattaatattttaagaggagtaaactatggcgttgcaagataaaggcatattagaagcactactatacacagccggagacgaaggtttggatcaacagcaactactagaaattttagaaattgaaccaacaacattaacagaattaattgaagcgtatgattcacccggtttaacgattcaacactacggtaatacttatgtattaactaccaagaaagaagcatctgattatatcgaacaattaattgaacaaaaatcaaaaatgaaattatcacaagctgcaatggaatctttatccatcattgcatataatcagcccttatcacgcagtgatattgaactaattagaggtattaattcagacggcgctgttaaaacattaatcgctcgcggtttagtagaagctaaagagcaagccgattctagaagtcatcaactttataccactgaactatttttaaacgtatttggtattgaacatttagacgatttacctactacagacgaagaagatgaagaaatcgaagcgttctttagtaacttagttaatcaaaaaggagataatcatgaataaagatacagaaagacttcaaaaacgtattgccaacagtggctatacttcacgtagaaaagcagaaactttaattactgaaggcaaagtaaaagtgaatggcacagttgaaactgaattaggcactaaagttaaaccttctgatagcatcgaagtagagggtatcaaattagaacaagaagacaaattatatatactattttataaacctgcacaagtcatcaccagtgtttcagatgacagagggcgtaaagttgtaactgactactttaaacaaattaaaacaagaatttatccagttggccgtttagattatgatacatctggtttattattactgacaaatgacggcgaattcactaatcttatgacacatccacgttataaaataaagaaaaaatatgtagtaaaattaaaaggttatctcatgcgtgaagaagtgaaatcgcttgaacaaggtgtccaactagaagatggtgttactcaacctgctataattaaagtgaaaaatcaagataaagataaaaacacaacattagttgaaatcactattactgaaggacgtaatcgacaagtgcgtcgcatgtttgaacattttggacatcaagtaaccaaattgcaacgcattgaatttggaccattaaacttgaaaggtttaaatgctggtgaaggtagagtacttacgccacacgaagttaaaatgatacgccaaattgcagaacacggtaattaatctgaatttaaattatcaactatgataattttttcacaaactttttcttcataaccacttttaaccttaaagctatgatataatatggttgaattagaaagttagtcgtgtgggaggtatatacgtatgtcaaacgaaatactaattgtagacgatgaagatcgtattagaagattattgaaactatatctcgaaagagaatcttttgaaatacatgaagcaaatgatggaaatgaagcatatagaatggcaatggaacatgactatgcttgcattttattagatttgatgctacctgaaatggatggcattaccgttgcgtctaaattaagagagcataaggaaacacccattatcatgttaactgctaaaggtgaggaaacaaatcgtgtagaaggatttgaatctggtgcggatgactacatcgtaaaaccattctctccaagagaagtggtcctacgtgttaaagcattattaagacgtacacaagtggcaactgccgaacaaagcgaaccacatgcacgtgatttaatagaatttgatcacttagtgattgataacgatgcacacagagtgttggcagatggtagtcaagtgaatttaacacctaaagaatatgaattattgatcttcctagcaaaaacacctaataaagtatttgatagagaacaattactaaaagaagtatggcattatgagttctatggtgacttacgaactgtagatactcacgttaaacgtttaagagagaaattaaatcgtgtatcagaggacgctgcacatatgatacaaactgtatggggtgttggttataaatttgaaatcaaatcaaataatgaatcaactcaatagcgtcgtcattaaactgtggttaactattatttttatagtgactacagttttaattttattaagtgcagcgcttataacgtttatacaatcttatttcacgcaagaaacagaagactcattattaaaagatgcaaaacgaattagtcaacttttagaaagcgcagataatagagaaactgcaattcaacatagtagaaaattaatcgaaggaccagttggacttatcataatgaatgataagcatatagatagacaggataaagataaaacgaaaaacaaaatggtcaaagaaattaaaaaaagcaatgattacaatcaagtatttaataatggtaaacaagtttctgaacatgtcaccttaaatatgaatggaaatcaacgaacttatgtattaatcggttatcctacaaaagccatttcatcagcggataatcacacaaataagtttagtggtgtattcatttatcaagacctaaaaacgattgaagacacaaacaatgtcattaccgttatcattttaattattgcgattatctttttagcgataacaactatctttgccttcttcttatcttctagaattacaaagcctttaagaaatttaagaacacaagcgttaaaagtatctaaaggtgattatgcgcaagttgtcccagtcaattcgcgagatgaaataggggaattatcacgcgcatttaatacaatgagttccgaaatacagcaacacattgacgcgttatcttcatctaaaaatatccgcgatagtctaatcaattcaatggtagaaggcgtattaggttttaatgataaaaaagaaattatcatttcaaacaaaatggctaatactacattgcaaatgttagatgattttgctttagaaaaacttgatgaacaaaatgaacttacatttaaaaataaaaaaacgcaatttgaagtttatgaaattaacacgcgctattttgtaattattacaagctatatcgaacaaattcaacctgatggtcgcagtggtattgtagctatcattcgtgatatgactaatgaacataatatggaccaaatgaaaaaagactttattgcaaatgtatcacatgaattacgcacgcctatatctttactgcaagggtatacagaatccatcgttgatggtatcgtcaccgaacctgcagaaattcatgagtcactatcaattgtgttagatgaaacaaaacgcttgaacagattagtgaatgagttattaaatgttgctcgtatggacgcagaaggattaactgtaaaaaaagttgttcaacccattgatcatttgcttgataaggtgcaacaaaagtatcaaaaacatgctaaagatttaggtttaaatatgaatttaagtccaaatactcacaatcagatgtggtattatgattctgatagaattgaacaagtattaaccaatcttatagacaatgcttcaagatatactgaaccaggtgacgaaataaagattgagtttggagaaacgcaaactgaaaacatcctttatattagtgacactggatcaggcatagcacctgaacatttacaacaagtatttgatagattctataaagtagacactgctcgtaaaagaggtaaacaaggaacaggattagggttgttcatatgtcgcatgattatacacgagcatggtggtactatagatgttaaaagtacacttggtaaagggactacatttatcatcactctaccaaaacctaaaacaaactaatttatctttaataattctaatctattacaaatccgtcacaagcatggtactactatggcttgtggcggattattttcgttggtatcttgaatttaatttaatttaatttttaatcattttatcccatgcgcaatacacacaatggctcggcaatgagttattttaagcaattctattgtttttatctgactaataagctatgataaatttataaaatttaagaaattcatcttcggggtagggtgcaattcccaaccggcagtaaataaagcctgcgacccattttattatatataataaaatggctgatctagtgaaaatctagagccgacagtaaagtctggatgggagaagatggaggacatgatttgttgtgcaatttattcctcctattctatgtaagatgaatggaaggagacaattaaatatgcatcaacaaacaaaaagactcattaccataagtatgttgagtgcggtggctttcattttaatgtttataaaatttccaataccatttttgccaccttatttaacgttagattttggtgatgttcccgcattattagcaacatttattttagggcctgtagcaggtcttattgtagaattcataaaaaatttactcaactttttatttaacataggtgatccagttggaccagttgcaaattttttagcagcatctagctttttattaacagcttattttgtaacgaaatataaagataaaattaagtcacaaattgttggactaagtattgcgacagtagttatgacaattgtattaagtatactgaactatttcgttttactcccactgtatggcatgattatgaatctatctgacgttgttgaaaatgtaaaaatcgtcatcgtatctggtgtgattccctttaacatcattaaaggtattgtcatctctatcatatttattttgttatacaacagactaaaaaatgtcttacctaaataaaattaaataaaagaaagatagacaaaacgagccatgatatattaatatcacgactcgttttatctatcgctttaaaaaaataaaaagttagcaaatgtcacagtgatgacgttactaacatggttgtatataaatactattttgcaataatagcattattcaaattttaatgcatcgccatcaaatgattcctcttcaattttaattgaatccgtaggacaaccatctaatgcatcttccatatcttcatatagttcttctggcacttccgcagtaccttgattatcatctagaataacatatgcaataccttcgtcatcatagtcataaatatcaggggcagcggcaccacaagcaccacatgcaatgcatgtatccatatctacaattgtatatttagccaatttcttcgcctcctttgacaaaaatgctacaataattacacaaatattattgtaatcacagtttatcgttttttcaaatgttttcgatttataagatgagggagcgtctatgtataatataattcattttgcatacacaaatgcacataattacaaaaccgaaaaaagtatatttaatattatcacagggaaaaagactcatcaaaccttttttgacgcctgtagtcaacaactattgtcattgtatcatagcttacctaatttaaaatatccgtcgtttgagcgatattctaataattttaacattgaaacagcgcaatatcaaagtatcattaatcatcctcgacacacatacgacagtcttgtgaacacgtttaatgcaattcaattgttaactcagacactttccaatactggccatgctatttatgaatttgtaccgatcacacaacatcgtactgtgcaaaaacaagttaaacaactatataaaaaaataacagatgaagatttaaaatctcaattcatcgaagaacttacaaacttatttcatacgttatcagaaaaaaacaatcatgtttatctccattactatttacaaggttttgaagaaagcatgtacactagacaacaagtaagtttaattgaatctgtatctcaagaacacttatatgaattggaaataagagatttagttactttaatgtatgaaatagaagatgattcacaatatcctttattaaatcaacttattatattacctgctttattacataagacaacattaacttatgaaggtataaaacaaggcatgcattttgataaattagcagctcaacaaaatgttaaacaaaatacgatacaagatcatatcttagaattatttatcaaaggttatttaacagattatccttcatttttaatacataaaacttatgaacaatttattccacattacttgtcaaaccgtagtgaacgtttaagaaattataaaactatatttccagatcttagttattttgaaattaaattaatcattgttggcattgaaagaggtgatttgcatgcttaatgaagcgttaaaaaaacactttggttttgatacttttaaacctggacaaaaagaaatcataacgcatgtacttgaaaagaaagatacattaggtattttaccaactggaagtggcaaaagcctatgctatcaattgccaacatatataaatcaacaaccaacactaatcatctctccattaatctcattaatggatgatcaagtcatgcaacttaaactacatggtgagcatcatgtagcttgcattcactcaggaatggatgaacatgaaagggctcaaaacattaaacaattgacgaaaagtcgctttattttcttaagtcctgaatttctactacaacctcataactttaaattaataaaacatataaatctaggaatcatcgtattagatgaggcacactgtctctcagaatggggttatgatttccgaccgcattacgccttagttggcaaaatcgtcaaccattttcataacgctactgtattagctttaacagcaacagcaccatcctatttaacatttgatttaaagcaaatattaaataaatcttttcatatcgtaaagacaaccatgaatagagataatatttcgttatcgcataaaaactttgctgatgatgatgagaagttgaaatggttactaccttcattagaacacgctggtccaacaattatctatgtatcatctaaaaaaatgtgtctattattagcgcaacaaatatacaactatggctttttaactggtatttatcatggcgacttatcttatcaagagcgtcatacggtacaacatcaatttttaaataatgaaatcccaatcattgttgctacaagtgcatttggtatgggcattaataaaaaagacatccgaacaattatccattttcatttatctacaagtccttctaattatatgcaagaaataggtcgtgctggtcgtgacgggggacaaagtcaagccattagtctttatcaaccagatgatcgttttttattagaaacactattatttaccgatatgataacgatggaggatgttgaaatattcgaactcggtcaatttttgcctcctgaaaaatcagaagttctacaaatactttatagctattatacatatcaacaattacgtaatatattcgagatttcatacaaacgtaaacatttaggatatatgcgcatgttaggctataagcatcttgatcaatgtcgacgtgcttatatgatagaattttttaatgaacaattgagcgaaaaaccaaatcagtgctgtgataatgattctgaaattaatgcaataaatatattaaatagaaaaaaagttaaaagaaaaatggattttaatgaaaaaatacaaaatttatttaaataatagacaattactttacttcatattttcaatcaagctataatacggtgtatacacttgtttaatagtaatttttcttcaaaaagtcatacatatttacaatcttttagggtaaaacagtatatacttaaataaaaaaaggaaggatgatgaatttgtctaacaacaattttaaagatgattttgaaaaaaatcgtcaatccattgatccaaaagaacaccaagaaaatactcaagactcggttaacgattcagttgacaatataaaagaggaagtgtctgataaatcagatgaacaatttcctcctagaaatgctcaacgcagacaacgtcgaagagacacagcaacaaatcaaagagaagatgagcagtctaaccaagaacatcacaacgaaaataatgaagttggtgattgtgataatggtttacaacacgaagacaattcttcaagagattcaaatgcagacaaagaatctaatgatccttcacaaaataacaatttgattcacgaatcatcaaacaatcagcaatctgaaaatcgtcatgatataaacaatgaaaaagatcaatctgacaaagatagcaataataaaaaaggtgctgctatcgccagtagtggtgctgcaggcgttggtgcttatgctgctagtaaacataacgatgcagcttcaagttctaaagaccataacgataaagcgcatcaacaaaatcaagattgggaacaatccaatcaaacgaatgattcgacagaaacgcaagatgaaaatacaaacaatcatgattctaagaaaaaaggtgctgctgtagcaggtggcgctgccgctgctggagctggtgcttatgcagctggcaagcataaaggcaaaaaagataaaaatgataatgaaccagaacaaaatgaatccaaatctgacgttaaaaacgaagaaaaacatggttctaagaaaaaaggtgctgctgtagcaggcggtgcagcagctgctggtactggcgctgccgctgcttcacattctaaatcaagtactggcaatggtggtaatggtaacggcggcaacggcggaaatggtaataatggtgacaataaccatgattctgaagataacaacaagaaaaaaggtggtttacttggtaaactcctcccaattatagcagctattttaatcttagccgctataggtatctttggtggtatggcgttaacaggtaacaacgatgataaaggcagcgacgatgacaaaaaagtagctgacaacaaagataaagattctgataaagctaaagatgctgattctgataaagacagtaaatcagataaagataaagacaaagctaaagatgatgacaataatcaagctacaacagattctgatagtagtgatagctctgataatgccaattctgattctgaccaaggtaacaacgattcacaagatcaagctaacagcgatcaaaaccaaggcacacaagatgaacaaaatagtcaaaacaatcaagatcaacaaagcgatcaatcacaacaaaatggtcaagctaatagaaatcaaaatggttcatcagaccagtcacaaaatgcatcaaacgatagcaaccaacaaaataatcaatcttcaaatagtaattctggacaacgcactcacgttgtaaatggacaaaatttatatagaattgcgatccaatactatggtgaaggtactccagaaaatgtagaaaaaatcagagaagcaaataatattcaaggcaacgatattcataatggtcaacgtcttgtgataccacaataattttctttactactgataatttttatggataactattaaatagagtaactatcaaattatagataaaccctgcgcacatatttgcgtagggtttatctatgtttatttatcgagttaaatattaaataatataattttctttcaagcataaaccttatgaattcaattgttataaagttttcaaattctttcatttggaatttttaaaactattggtataatatatgggtggtaaaaggaggacgaataaagtatgcaaacagttgaaagtatcataataggtggcggtccttgtggattaagtgctgccattgagcaaaagaaaaaaggaatagatacattagttattgaaaaaggtaatgttgtagacgcgatttataattatcctacacaccaaacattcttttcttctagtgacaaattaagtattggggacataccttttatagttgaagaaagcaagccgcatagaaatcaagcactggtttattatagagctgtagttaaacaccatcagttacgaatcaatgctttcgaagaagtcctcactgtaaaaaaaatcaataaccgtttcacaattacaactacgaaagatgtttatcaatgtagatttctcactgtagcaacaggatactatggacatcacaatcaacttgaagtcgaaggtgcagaactttcaaaagtaatgcattattttaaagaggcgcatccttacttcgatcaaaatgttgtcatcataggcggtaaaaactcagcagtcgatgctgctttagaacttgaaaaagcaggcgcaaatgtcacagttatttatcgtggcaatgaatatccaaaagcgatcaaaccatggatacttcctaatttcgaatcgcttgtacgccatgaaaaaatcgatatggcatttaatgcaaatgtcactaaaattactgaggatagtgttttctatgaacagggtggccaaacatttgagatagccaatgactatgtgtttgccatgattggttatcacccagattacgaattcttacaatctatcggcattgaaattaatcaaaatgaatatggtattgcacctgtatataataaagaaacatatgaaactaatgttgaaaattgctatatagctggtgtcatagctgctggtaatgatgcaaatacaatttttattgaaaatggcaaataccatggcggtattattacacaaagtatcttatcaaaaaaacaaacacctttagaatcttaaattcctaagatataaaaagctgagacaactaaaaattgtctcagctttttataattcaaatagtatacttaatcattttaaagttgtgattcaaagtatcgttttaattgtttaaatgttaaatcattacttaatccaactagaagttttaacctagctttaggaccatttaaaccatttgagaaaataacacctttatctgttaaggttgcaccgccaccttcataagcataaattggtcctacaataccgttaaatgatctagatactaaaattataggtatgtttttatctaaacatttgtctagtccttccaaacttgttggtggtaaattaccttgtccaagcgcttcaatgatgatgccatcaacattattatcactatgaaacgttaacacatcactattcattcccatatatgccttaactaatggaatatttaaagtatggtctatttcatttaagataagatgctcatatggtttatggtgaaattgaacgctatttttagtgacaacacctagtgggccatgattagggctttgaaaagtatttgtatttgatgtatgtgttttcgtaacgttacgcgcagtatgaatttcatcattaaacactaccatgacacccatatctgaagactcgtcacttgttgcaacacgaatcgcagatatgaaattatataaaccatctgaacctatttcatttgaagaacgcatagcaccagtaatcgtaataggttttgaaatatctgttgttaaatccagtaaataagctgtttcttctagcgtatctgtaccgtgagtaataacaaatccatcataagattcatttttagttgcttcctcaataatttctttcaacttttccacatattcaatattcatatgcggtgaaggtacattgaacggtgttatttctgtcacatttgcatattgcgcaatcacatcttgatgattagatataggattatctttatttgtcaccactttgttagcttcatcttgtgacatgcttatcgttccaccggtatgtataacaagaacatttttcatgctagcattcctcctatttataatatacatatttatgataaaatattattcataaaacaacaaggaagggttacaaaaatgaaattattaaatatcgcactagatggacctgctgcggctggaaaaagtaccatcgctaaattattagcagctaaattatctatgatttatgtagatacaggcgcaatgtaccgcgcaataacttacaaatacttacaacaaaacaaacctgaagattttgatcaacttatagaaactactgaattgtctttaacttatgataaagacaaaggtcaaagagttattttagataatcaagatgtcactgactatttaagagaaaacgatgtaaccaatcatgtttcttatgttgcatctaaagaagcggttagaacattttctgtaaacaaacaacaagaattagcagctaaaaaaggcatcgtaatggatggaagagatattggtaccgttgtattaccagatgcagatttgaaagtatatatgattgcttcagttgaagaacgtgcagttcgaagacaaaaagataatgaagaacgcggtattgtttccaatgttgaacaacttaagcaagaaattgctgatcgagatcaatatgatatgaaccgtgacatatcacctttgaaaaaagcagatgatgcgattacagttgatacaacaggaaagagcatagaaattgttacacaagaaatattagcacttgttcataaaattagttaatctcaaataatagctagatatataaagccctttctttccaaattgtgtaaaaaggttatataatacaattatcgggtataaaacttacatgaatttttatactaatacgagctgcatataaagtgaaattgtaaaaaataggtaaagttatttaaaatttagttagctaaatgaccctattttacagcattttaacaattaatatttgaattccttaattaaagtggaatttcttgacaattttgtcagattataagatgttataaatatgtagtgtaataaggaggcagacaagatgactgaagagtttaacgaatcaatgattaatgacattaaagaaggggataaagttacaggcgaagttcaagaaattgaagaaaagcaagtaattgttgctgttaatggtgcaaaatttaacggtattatcccaataagtcaactttcaacacatcatattgataatcctagtgatgctgtcaaagttggtgatgaaattggtgcatatgttactaaagtagaatatgacgaagagaatgaaacgggtgcttacatcctttcgaaacgtcaacttgaaactgaaaaatcatatgaatttttacaagaacaactagacaataaccaaacaattgaagctaaagtcactgaagttgttaaaggtggtttagtggttgatgttggtcaaagaggatttgttccggcttcattaatttctacagatttcattgaagatttctctgattttgaaggtcaagttcttaaattaaaagtagaagaattagaccctgcaaataatcgtgtcattcttagtcgtaaagcagtagaggcattggaaaatgcagagaaaaaagatgaattattggaatcacttaatgaaggtgacgttatagaaggtaaagtcgctcgacttacaaactttggtgcattcgtagatataggtggcgttgatggacttgttcacgtttctgaattatcacatgaacatgtaaaatctcctgaagatgtggtttcaattggtgaaacggtaaatgtgaaaattaaatctgtagacaaagattctgaacgcatttctttatctattaaagatacgttacctagcccatttgaatcaattaaaggtgaattcaacgaaggcgatgtaatcgaaggcactgtcgtaagattagctaactttggtgcatttgtagaaattaaacctggtgtacaaggtttagtgcatatttctgaaattagtcattcacatattggttctccaagtgaagcgttagaacctggccaagtcgtaagtgtcaaagtgcttggtgtagatgtagagaatgagcgtatttcgttatctataaaagctaccttaccaaatgaaaatgttatcgaaagtgatagtgaaacaacacaatcctatttagataatggttctgatgacgaagataatccaacattgggtgatgtattcggtgataaattaaaagactttaagttttaatacaaagtatgatgccaattttaaatcttgtcctaatgataactagggcaagatttctttttttgccataaaattacaatgtaataactataacagtcatattgttttaatatttctttttatttatctaacccgtatgatagaattatagagattaaaaaagagaggaagttagttatgactaaacctatagtagcaattgttggtaggccaaacgttggtaaatcgacaatttttaatagagtcgtaggcgagcgtgtatcgattgtagaagatacgccaggagtgactcgtgatagaatttattcatcaggtgaatggttaacgcacgattttaatatcattgacacgggtggtattgaaattggagatgcaccatttcaaactcaaataagagctcaagcagaagttgcaattgatgaagctgatgttatcattttcatggttaatgtaagagaaggcttaactcaaagtgatgaaatggttgcacaaatgttatataaatcaaaaaaacctgtcgtgttagccgttaataaagtcgataatccagaaatgagaaatgaaatttatgatttttattctcttggctttggagatccatacccaatatccggttcacatggacttggtctaggtgatttattagatgcagttgttaaacattttaaagaagaagaacctgatccatatgatgacgatacaattagattatcaattatagggcgtccaaatgtgggcaaatcaagtttagtgaatgctatcttaggtgaagaccgcgtcattgtttccaatgtagcaggcacaacacgtgatgctgtagatactgaatatagctatgatgatcaagactatgtattaattgatactgccggcatgcgtaaaaagggtaaagtatatgaaaatactgaaaaatactccgttttacgtgcactaaaagcaatagaaagatcgaacgtcatacttattgtcatagatgctgaacaaggtatcatagaacaagacaaacgtgttgcaggatatgcgcatgaagaaggaaaagccatcgttatcgtagttaataaatgggacacggtagataaggaaacaaatacaatgaaaaaattcaaggatgaagtacgtaaagagtttcaattcttggactatgcagaaatagcatttgtttcagctaaagaaaaacaacgtcttagaacgttattcccatatattaaagaagccagtgagaatcataaaaaacgtgttcaaagttctacacttaatgaagttgttactgatgctatatcaatgaacccgacacctacagacaaaggacgtcgtttaaacgtattttatgctacacaagttgcaattgaaccaccaacatttatcgtttttgtcaacgatgtagaattgatgcatttttcttataaacgttatttagagaatcaaatcagggctgcatttggatttgaaggtacaccagtgcatattatagcaagaaagagaaattaatcatcggaggggatagcatgtctaaagttaccgtttttggtactggaagtttcggtacagcattagcaaatgtcttagccgaaaatggacatcaagtattgatgtgggggaaaaacgaaaccacaataaatgaaattaatgaacaacacattaatagtaaatatttaaaaaccgctgagttaaatgaagatattgaagcaacacttgatattgaaaccgctgttgcttttgctgatatttatttaatggcactacctaccaaagcgatgagagaagtagctcaaacaattgattcgttattatctagtaagaaaacgtttatacacgttgctaaaggtattgaaaatgatacttataaacgcgtatctgaaatgttagaagattctatttcacctaaacataatgcaggaattggcgtactatcaggaccaagtcatgccgaagaggtagtcattaaacaacctacaacagtagcagcttcttcaaaatcagaatctgtacgacaactaacacaagatttatttatgaatgattatttacgtgtttacacaaatgaagatctcgtaggtgttgaactcggaggcgctctaaaaaatatcatcgctgttgcaagcggtgtaatttcaggaatgggcttcggagataatgctaaagcggcattgatgactagaggtttggctgaaattagtcgtttaggcgaaaaattaggtgcaaatcctattacttttcttggtttaggtggtattggcgatttaattgtgacatgtacttcaacacattccagaaactatacattaggctataaattaggtgaaggaaaatcacttgatactgctttaaatgaaatgaatatggttgtggaaggtgtatatactacaaaatcagtttaccatttatcaaaagaagtcaatgttgatatgccaataacaaccgctctatacaaagtattattcgaaaatagacccgtagatgaaagcgttaaagatttgatgggacgaggaaagaaagcagaataacagagtataattacacttttcataaaatatataacaatttgctatcaaaatcctattatttcaacgttttttgcgcataaatcattgcagtagcagtaatcgttgtgttaaagtcataccataatgatattaagtatcattataaaccctaggggaggtgaattcataatgaacaagacagatttaatcaatgctgtagcagagcaagctgatttaactaaaaaagaagctggtttagctgtagatgcagtattcgaatcaattcaatcatcactttctaaaggtgaaaaagtacaattaattggattcggtaactttgaagtacgcgaacgcgctgctcgtaaaggccgtaaccctcaaactggtaaagaaattgatatccctgcaagcaaagttccagcattcaaagctggtaaagctttaaaagacgcagtaaaataattctttactaaaagtgaagccctttttaaggggctttttctttttttattaatcttttaattaaatacttatcaatataaacaaaaactttatgatatcatttgtgttaactacaaactatatattcacaatgatttaagatacaatgaaactaaaattaatacatacgatgaaataaatcacagttcagactaagacaagcacattcgttttagtctgaattataatgtgaacaactggtgattggattaaaacagctttaaatcagtcatttcaagcactagccattctttccaaattgagaagacgaaacttttttagcaaaatgatataagtagttcttacgctttttttatatataatgcacgattattgttaactatggttttcgttgattttatttttctctatataatgttaatatgtatatggataataacgtgaggtgtgaacatggaaacgacattaaacatattagaaacacaaattacacagcgacttcgcggtgtaaatcattatgaatcaatctatataaataaaacgttggcacaaattcttgattcttatgatataccacaagaagctaaattagcttgcctcacaatagatacagcaatgcgtcacttagacgaagtttctacaactttatcgtctaaaaaatctattttaataggtgacttgttaagtgcacatttttatacattattagcaaatttaaatgatccaacttatcaaaaagaaattagtacagccattgtagaagtaaatgaaatgaaatcttctattcaccacgaagcaatagatattaacgctattggagcatatatattaaaaatagaaaatacatttccactaattacaataaaacgatttattccaaatgctgatacttcttttatcaacgataaattaatagcaaatttaagtgaaaatcatccttcatatttaagtaattattctaaagaaacgttagaatcatttttagaccaactaaaaactgaaattcatcaaaaaagaggtaattaatatggcagataataaagcaaaaaaagaacaagtacatgatgttttccaaaatatttctggtaaatacgatcgactgaataacatcataagtttcgagcaacataaaacatggagaaagcgcgtaatgaaagaaatgaatgtgaagtctggatctaaagcattagatgtttgttgtggaacagcagattggacaatctctttaagtaaagctgtaggtcacactggagaggtcatcggtgtagatttcagtgaaaacatgttagaagttggaaaacgcaagaccaaagatatgcataatattcaacttgttcatggtgacgcaatgaatttgccatttgaagataacgaatttgattatgtaacaatcggttttggtttaagaaatgtgcctgattatttagcaacattgaaagaattaaatcgtgtacttaaaccaggtggtatgattgtttgtcttgaaacaagtcaacctacaacgccagtatttaaacaatgttacaaactttattttaaatttgtgatgccaatttttggtaaaatttttgcaaaatctaaagatgaatatgaatggttacaacaatcaacatttaattttccagataaagaaaaactgaaaagactatttaatcaagcaggttttagtaatgttaaagtccgtagctttacaggtggcgttgcagcaatgcaccttggctataaataaaaatgaatcaaccaaaggtgattagcgtgtcaaagttaaatataaatagtgaaattaaaaaaatagaaaaacgattagaacagtcaattaaaagtcacgataaagtactcgaggctgcttcacatcatttattttcttctggtggtaaacgcgttagaccagcttttgtaattttaagtagccaattcggcaaagaaatgaatgaagatgtttatcgtgtcgcagttacgcttgaattaattcacatggctactttagtccatgatgatgttatagataaaagcgacaaacgtagaggcagtttgacgatttcaaaaaaatgggatcaaaacacagccatactcactggtaatttcttactcgctcgtggacttgaacatatatccaatattgaagctaatcgtgtacacgctgttatttctcgcgccattgtagaagtatgcatgggagaactatatcagtttcaggatcaattcaatggacatcagacaataacaaactacttacgtcgaattaatcgtaaaacagcattgctcattcaattgtctacagaagtaggtgcaatcacctctggagctgacgcaaaaactgtacataatctaaaaatgattggccactatataggtatgagtttccaaattgtagatgatatattagattttactagtactgagaaaaaactaggcaaaccagttggaagtgacttgatgaatggtcatttaactttgcctgtgcttttcgaaatgagaaaaaatgaaacatttaaacaacaaatccagcaattaaattcagaaacggatcatgaaacattcgttaaactaattgatcaaattagaaactctaatgtcattgcgcaatctcaagctgtaagcgacaaatatcttaataaggctttacatttaattgatgaattagataacgaagattcaaaatcattatttaaaaagttaattaaaaaagttggtaaaagaaatgtgtaacttatgtgaaaaacattgaaggcgctttaataacctgttaatatatgaatgtgattcaaaacatatttttatttttaatacatatttgtgtacattaatttattaatcgtacactgatacataacaaacagggggcagcacacacaatggaaagaacatttttaatgattaaaccagatgcagtacaaagaaatttgataggggaaattatttctcgcattgaaaggaaaggtctcaaattagttggtggtaaatttatgactgtaccacaatcactagctgaagagcattatgctgaacatactgacaaaccgttctataaacatttaattagttttataacatctgcaccagtatttgcgatggttgttgaaggtgaagatgcagtacatgtagctcgtcatattataggtaaaacaaacccatcagaagctacgccaggtacaattagaggagaccttggtttaacagtaggaagaaatattatacatggctcagattcagttgagtcagcaaataaagagattaatctttggtttaaggctgatgagttaagtgagtactcagagtctagagaatcttggttatacgaataatcattaaaaattgtaaataccaataattaaactgattagatcattgtatctaatcagttttttatatgtacaaaacaaattttccactcgttttacatgactatagtaatcaagtacaggatttaatataatttaaataactcaagtgttacacttgtaaaataataatattagaagtcatttttatgaatattcagcaattattaattttcctattaatttgaactattgaatatgataagatatagaacatatattaatttaaagtactaaagaacggagtgggcaaagtatgagatatttaacttctggtgagtcacatggacctcaactaacggtgattattgaaggcgtgccagctaatttagaaattaatgtagctgatataaatgaagaaatgtttaaaagacaaggtggatatgggcgtggtcgccgtatgcaaattgaaaaagatgctgttgagattgtttcaggtgtgagaaatggttatacacttggaagcccaattacactgattgttacaaatgatgacttcacacattggaaaaaaataatgggcgcagacccaattagcgaggaagatcaagataatatgaaacgtgttatcactaaacctcgtcctggtcatgcagatttaatcggtgggatgaaatacaatcacagagatttaagaaatgtattagaacgctcatctgcacgtgaaacagcagcacgtgttgctgtaggtgccgtttcaaaaatacttttaaaacaattagatattaacttttatagtagagtagtagaaattggtggagttaaagatgatttagaatatgacttagatacaatcaaatcaaatatcgataaaaatgatgtgcgtgtcgttaatgatgaaatcgcgcaaacgatgcgagataaaatcgatgctgctaaaaaagctggtgatacaatcggtggcgttgtacaaacaatcattgaaggtgtaccggttggaattggtagctatgtacattatgatcgtaaactagacggtcgaattgcacagggtgttgtaagcatcaatgcgtttaaaggcgttagttttggtgaagggtttaaagcagctgaaaaacctggaagtgaaattcaagatgagatattatacgatacaacaaatgggtattatagaggctcaaaccatttaggcggctttgaaggcggcatgtctaatggaatgccaatcgttgttaatggtgtaatgaaacctattccgacactatacaaaccattaaattcagtagatattaatactaaagaatcatttaaagcatctattgagcgttctgatagttgtgctgtacctgcagccagtgttgttgttgaaaacgtagtcgcatttgaattagcaaaagcattgctcgaagaatttcaatgtaatcatattgaacagcttcaatcacaaatcaaagaacgtcgtttattaaatatagaatactaaaatgtaactaaaaaattaacagattattgaggtgattacatgaaactagaaacaacttataaatctaataattatcctatcattgtagaacaccaagcaatagaccatttacatcagtttatcaaagactatgaagatgtcgtacttgttgtcgatgaacatgtaaaccatgattggcacgaattgttagattttatcacttctgaaaataatgcgcataaattgatcattccttcaggagaaacgacaaaaaccttatcattttatgaaaagaccatcgaatcattattagctaaacaattaacgcgtgatacatgtctcattgcgatcggtggtggtgctactggtgatttcacaggttttcttgctgcgactttattaagaggtgttgatttcattcaagttccaacaactattttggcacatgattcaagtgtgggtggcaaggtagggattaattctaaacatggtaaaaatctaataggcgctttttatagacctaaagctgttatttatgacctgaattttttagaaacattaccttacactgagatattaagtggttatgcagaagtttataaacatgccttactaaacgatataacgtctgtaaataatattgaagcacagtatccaaatgaacaagcacttgcttcgttaaaggatattgaatattttctatataaaggtatagaaacaaagctaaatattattgttcaagatgaaaaagaatctaatgtacgtaaatatctaaatttggggcatacttttggacatgctgttgagtatcaatttaaaatcccacatggtcacgccgtcatgataggtataatttatcaatttatagtttctaatatcatattaaatacacattatgatatttcacattatattcagtatttaaaatcactaaactatccgttagaagtcatccaatcatttgaatttaattcattgtatggattaatgttaaaagataaaaaaaatgatcaacaaggtgtgcaaatggtgcttttaaatgctattggggatcctcaagtcaaacacgtagataaagccacactttcacaagcttttgaaatattcacaacacattttgaaaagtaggtgcctaaaaattgtcaaatagtaaattagtaaaaattaacggaccacttgttggggaaatcgaagtacctggcgataaatcaatgacacatagagcgattatgttaggttcgcttgcaactggaaaatcaaccatttataagccgcttctaggtgaagattgtcttcgtacagtcgaaatatttaaacttctaggcgttcaaattgaagtcaatgaagataaaatcgaaattgattcacctggctataagtatttcaaaacaccacaccaagtgttatatactgggaattctggtacaacgacgcgtttagtcgccggattattatgcggactcggcatagaaacagtcttatctggggacgaatctattggtaaacgcccaatggatagaattatgaaaccattaagatacatgaatgcaaatattactggaattaatgataattatacgccactgattattaaacctgcttctatcagcggtattacttatgaaatggaagtagccagcgcacaagttaaaagtgcaattctttttgcaagtctttttgctaatgaaccaacgaaaattaaagaatttgatacaacacgaaatcatacagaaacgatgtttgaacatttcaatatacctattgctgtaaataatgacattattgaaatgccaagtcttggtatcgaacatattaaacctgctgattttcacgtaccaggtgacatatcgtccgcagcatactttattgttgctggcttgattacgccgggcagtgatattacaattcacaatgttggcattaaccctacacgttcaggtatcatagatatcgtgacacaaatggaagggaatatcacattgtttaatcaaacagataatccagaaccaacagcatcaattcgcgtgcaatattcacctaatatgaaacctattcatattgatggtgaccttgtacctagagcgattgatgagattccaattgtagccttactttgtacgcaagcgaatggtacaagtattgtaaaagaagcggaagaacttaaagttaaagaaacaaaccgcattgatacgaccgcaaatatgcttaatttgttagggtttacattgcaaccaacgaatgatggtttaatcatccacccatctgcatttgaacaaacggcgacagttaacagtttcactgatcatcgtattggaatgatgttagccatcgcgtcattgttatcaaatgaagcactaccaatcgagcaatttgatgctgtcaatgtttctttcccaggtttcttaccaaagttaaaacaattagaaaaagagggataatagtatggaagatatctacaaactcatagacgatatcaacttacaaaaattagataacctagatacacgggtaaatgatgcattaagttcccctaaagacgatgcattatttattcttggtgaaacgttatataattatggtttaatgcctcagggcttagaagtgttccgtacgctttaccacaaatatcctgatgaaagtgaactattaatctatttcatcgaagggttaatgtctgagaaccatactgatgaagccttagagtatttaagtgaagtggaaatgtccactgaaagattaatgttagaagctgatttatatcaacaattaaatatgcttgaagttgcaattagtaaacttgatgaagcaattgacattgaaccaaatgatccaattattcattatgcattagcagaattattatactatgacggacagtatttaagagctacgtctgaatacgaaactgtccttgaaacaggcgaatatgaagtaaatggcgtgaatttattttcacgtctagctgactgtagtttgcaaagtgggaattatagcgatgctatcaaaatgtttgatgaaattagtgaagacgagatggactctgaagactattttaaaaaagcaattgcttatgaaaaaaatgatcttacgcaagaggcaattaatttagtacagactttattatctaaagatcctgatttcttacaagcttatttttatttacaacaattatatgaaaatgaacacaaccatgcagatgcaattgaaattggtaaagaaggtttgcgcttaacacaattttataaagaattaatggtctctacaggaacaattcaaatagagcatggcgatgcaaatgaaggtgtccaattgcttattcaagcattagaagtagataatgcataccaagaacctttactaatattaagtgatttatatagacaagaagaagattacgaatcactcataggattactacaatatgttgacgaagaagacttggatcctgtctttatgtggcatcttgcctatgcacttggccaagaagaacgagataaagaagcgcaacactttttcgaattagcgtatacgacgttacaaacacaatcagcatttttaagtgattactattattatttgattgaaattggccaaattaaacaagccaaaatgattttagaccaattattagaattagagcctagtaatgaaacttggcacgacgaagctgaaagattacaatctttctaaattaggaaaggtgggttcgaatgacttataccctacaacaatctaaagcagcttttattgaataccttctatttcattatcagtttaaatctagaattagtgtatgggtattgaatttaatcaagtcatcaccgaatttattgcaacaaatacactttgtagatgcacgtattccaaatcataacacactagaaatagctacagaaaatacggtagagcctgcaataagatttacactagacaatcaacaattaatcaatagcaatgaaatctttgaatttatagcaaatgatgctttgtcttttgatataaaagtatattttagcgacacgcaaaaaagagattataaattagataatttattgttaacacaattactcaattcaccttattatgctgtatatatgcaagatatatacagcattcctttatcgaagcaaagtgagacttctattatttctcatttacaagataatattgatttaagtttacaattacatgataaagcgttgttttatcaattatcacaaatccttaatacgtttaaattaagaaatgtaaatacatcaacgagggactgacgctatgaatataaaaacgttatggcatgcaatgatatatcataagggtgtgctttacttcttacttatttgtaatttactaggaacggtatatggttatatatggtacggtagtcaacttagtgttactgatatacaatttaaggcctttgtacctgatagtccgactgcatcactgtttctatgtattatcattctggcctatatattcggtaaacaaacacccatttttgaggctttggcctttgtatcgcttattaaatacggtgtttgggcagtcattatgaatatcatcatgtttatacaatacgatgcagtaacgattacgggttgcatgcttatactatcgcatggcgtaatggcagttgaagcattcgtcttttatccaaggtttaaaatatctatttcagcatttattattgctatgatctgggtatttcataacgatattatcgattacgtttttatgcagtatccctattatgattttatcgcgagtcatattgaaggtgttgcttatctcgctttttggttgagtattattccgttaattctatatttaaatttaactcgatttaaaaaagataaaatatttgaccactaatgaaggacacagtaaaatgtttataaaggagtgaggtttttgtcttttatctatatgattatatactttgttatattaatggtactgcctctttgggcgcagcacaaagttaaatctaattatgaaaaatattcacaagtcagatctacaagcggaaaaacgggtcaagaagtagctttagaaatacttcatgctaatggcatttacgatgttgatgttgtagaaggacaaggtttcttaacggaccattacgatccacgtaagaaagtacttgtactatctccagctaactttagcagaccttcagtcgctggtactgctattgctgcacacgaagttggtcatgcaattcaacatgcgcagggctatttcttcttgagattcagaacttctttagtaccgcttgctaatattggtagttcaatcggctatttagctgtatttgcaggtattattttaacaagcttacaaagtactttaggttctacagcactatggattggtatagcatttatgtcatttgcagtattgttctcaattgtcacattaccagttgaattcaatgctagtagtagagcaatgaaacaaattcaaagtttagatatcgtaaatgaaaaagaatatcgtcatgctaaaaaagtacttacagctgctgcaatgacttatgttgcatcaactgcagttgctttagcagaacttgcaagatttattctaattgctagatcaagtgattaatataattgattcccaaacatctttgatgtttgggtttttttatgtgctaattcttaaattttctcataatcaaaatacgaccgttgtaatacaattattgagttccttatgtatagtacatttttcctcatctagatacacaagtatcctactgctttctaaatatattttttcacaatcaagcataagccttaactgttgcaggaataatgcatgaaacataaaattagtctatactataaaagaaaccgttagaaatgagaggcatatattatgaaatctatgaaagaaatgcaaaccgaagtagatgactatattggacagtttaaaacaggatatttttctccattagcgaacctagcgcgcttaactgaagaagtcggggaactttcnagagaaatcaatcatgtatatggtgagaagaagaaaaaagcttcagaagatgataatacaattaaagcagaattaggagataacttatttgtcttaatgtgtattgccaattctttagatatcgatttaactgaaagctttgatgagacgatggagaaatttaatacacgtgacaaaaatcgtttcgaacgaaaataattttacatgaatgagaaaggatgtaccgccttatgaaaataggcatcacttgttatccatctatgggtggttcaggcattatagctacagaattaggtatcaaactcgctgagcgtggtcatgatattcactttattacatctaatataccgtttagaataagaaagcctttaccaaatatgacgttccatcaagttgaagtaaaccaatatgccgtttttcaatatccaccctatgatataacactgagtacaaaaatcgctgaagtcatcaatgaatatgacttagatgtgctacatatgcattatgctgtgcctcatgctgtgtgtggtatattagcaaaacatatgtcacaaaaagatataaaaataatgacgaccttacacggtactgatattacagtgctcggttatgaccattctttaaaaaatgcaattaaattcggtattgagggcagcgatgtggtgacgagtgtaagtcaatcacttgcacaacaaacttatgatatcatcgaaactgataaagagattgtccctatatataattttgtaagagaaaaagaatttcctaccaaactcaatacaccaacttcagaggatgaacaactaaaagcttgttacggtatccaacctgatgaaaaagtactgattcatgtgtccaattttagatcagtgaaacgtatcgatacgattattgatacatttgcaagagtgcataaagctatcccatctaaattaatcttacttggcgatggccctgaacttatggatatgaaagaaaaagcacgtcaacttaatttagaagatgcagtgttgtttttaggtaagcaaaattgggtgagtcaattctatcaaatttcagacttagttctattattgagtgaaaaagaaagctttggattaacattgcttgaagctatgaaatctggtgtggttccaattggttcaactgcaggtggtattaaagaagtaattaaacatgaagatactggatatatcgttaatgttggagacgatgaagctgcaagtgcgtatgcgattcagttactaactaatcctgaactatatcacgaaatgcaaacgcgaatgctagaagatgttgcaaatagattttcatctgatttaattgcagatcaatatgagtattattacaaaaaaatgttagagggtaacaatgactaattctttatttgaaacagccaaaccaattctagaaaaattacaagctcatcattttcaagcctattttgttggtggctctgtgcgtgactatcttatgaatagacccattcatgatatcgatattacaacgagcgcaacgccggatgaaattgaaacaatatttgataagaccatacctattgggagagaacatggcacaattaatgtgatatacaaaggcgagcagtatgaggttacaacttttcgttctgagggtgattatgatgatcaccgtagacctaatgaggtcttttttgttagaaacttatatgatgatgtacagcgcagagattttacaatgaatgcaattgcgatggatattaattatcaaatctttgattactttgaaggacagcaggatattaaacatcaactcattagaactgttggtaatcctgatgaacgctttgatgaagatgcattaagaattatcagaggcttacgttttcaatcacaatttggctttcacttagaagaagctacttttaccgcgatgttaaaccacattgcagatattaaatatttggcaattgaacgcattgttgttgaattaaagaaactaacaaatggtgactttgtatcgaaaagttttaataatttaaagcattttatggcttttaaatatattccatttttcaaacactacgacatcaccaaattcacattacgtaatgccatgccttttacgacgtttgtagcgtttttaatatctcaacagcgtgaaatagatgcgaatattgctgatttaaaagtgagcaacaatgaagaaaaacgtattaaaacattagttcaacttatcgatcaaatagatgaagtacaaacaaaatcacaattaaaattatttgtttatgactatggaaaaaaagatatactagaagtattaagctatttagatgaattaaaacgaaatcgtattacatctatatcaccattaatagttaacgaccaaacagttactgaagttgcaaaacaattaccgatgctgtcaagaagtgaaatggatatcaatgggaaagatatattagaaatagcgaataaaaaaagcggaccatggctcaaagaaaccttacgtgaagtcgaatacgctataatatcaggtgaagtagtcaatttcaaacctgaacttaaaaagtgggtgaaaacacgtgtctaaatatagtaaagcagttgtctatatgttataccaatatgaatctgaatacatttctggccaatttattgctgagcaactttctatatcaagaacagctgtaaagaaagtcattgatcaattaaaagaagaagggtgtcagatagaatccattaatcataagggacatcgcttaattcaattaccagataaatggtacaaaggtatcgttatgccaaccattcaatctcaacatttatttgaacatgttgacgtattcgatcaagtagagtccacacaattattagcgaaacaaaaattagtaggcaatacagatacgtttttaatcctaagtgatgaacaaacgaaaggaaaaggccgtttcaatagaccgtgggcttcagccaaaggaaaagggctttggatgtcaattgttttacgaccagatgtacctttcgatacgataactaagtttaatttatttatggcgcttggtataagagatgctattcaacaatttagtaaaagtgatgtttctgtaaagtggcctaatgatatttatatcaataatcaaaaagtctgtggctttttaaccgaaatggttgctaatagtgacggtattgaagctgttatatgtggtattggcattaatatgaatcaagaaccaagcgattttactggtgaattagctcaaaaagcaaccagtattagaatacacaagaaagataaagtgaatcgttatgattttttagaagtgcttatttcacaaatcgagtatcgatataaacaatttattaaagaaccattttcatctattcgtgatgaatacatagctacttcaaatatatggcacaaacagttaagattcactgaaaataatgttcaatttaaaggtgaagccattgatatagatgataatggatttttaattgttttagatgagaataaacaacaacaccaattgatgagcgctgatattgaattataactcaaataatgaaaggaggaagtagaatggcaaaaccttgctatgctgtcgtagatttagaaactacaggcaaccaattagattatgatgaaattattcaaataggcataacatttgtgcgtgaaaataaaattattggaacgtatcactccatgattaaaacagatttagaaattcctccttttattcaagcgttaacttcaattgaagaagatatgttaaatcaagcaccgtattttcatgaaattgcagaagatatatacaaacaaatagatggttgtatatttgtagcgcataatgtggcgtttgatttaaattttatcaagaaatcatttaaacaatgccatatcaattatcgtccaaagaaagtcatggatacgttagaattattcaaagttgctttcccaacggataaaagctatcaattaagcgaactagctgaagcacatgggattatcttaaacaatgcccatagagctgatgaagacgctgccacaacggcacaactgatgattattgcattcgaaaaatttgaatctttaccattagatacacttaagcaactttattacctaagtaaaaatctaaaatacgatttacatgatattatatttgaaatggtgcgaaattatgatgaacaaacgcttagtgatcgatttgatcaattcgaacaaatcatatataaaaaacaaatagattttaaagcaccaaccgtacaattcggtggtaacttaaaagcactatacactttagtgactaaagaactggggttaacatatcgccctcaacaattatatttatctgaaattatattggaacaactcatgcatagtgaaaaagcaatgattgaagcccctttaggaagcggtaagtcatttgcttatctacttgcctcactgatgtataatatcgaaactggcaaacatgtcatgatttctacaaatacaaaattattacaaaaccaattattagaaaaggatattcctgcgattaaaaaagcattagatttcaaaataaatgcgacgctaatcaaaagcaaacgtgactacatcgctttagggttaataagtcaaatacttgaagaagaatctagtaattatgaagtttgcattttgaagatgcaattactgatttggattacggaaacagacacgggtgatattcaggaattagatttaaaaggcggacaaaaaatgtatttcgaacaaaaactcgaaacctatgttccagtccgtaatgatatacattattttaattttattaagcgcaatgcacaaaacattcaaattggtatcacaaaccatgcccacttaattcacgcagctcacgataactccatttatcaattatttgatgattgtattatagatgaagcacataggctgccagattatgctttaaatcaagtaactaatgaattgagttacgcagatattaaatatcagttagggttgattggtaagactgaaaatgaaaagttactaaaatctatagatctacttgaacagcaacgtattctcgaaaaattagacataccacctatagatgtttttggcttaaaaacgactgtgaatgagatacatgatttgaatgaacaattgtttacaacgatgtatgatattattcaatcttctgaaatacaagatgatgaagtccataaacttcatttcgtatatcactttgatgtcacacctatattaaacgacttacatgacattattcacaaattaaacatgacgttagaattctttaatggtatgagccataaatcaattaaatcagtgagaaagcaatttctatatattaatgatcgttttaaagatattgaacaaagtcttaaaaataaacacacatgttatttatctatcaaaaatttaaatcagaaatctactataagacttaatgttaaagattacgatgttaaaaaaatcctcacgaagcaagtgctcgataaattcaaatcactaacatttatttcagggacactaacattcaatcattcctttgagaactttaaacaatggtttaataaagatattgaatttaacacatatgaaattgatacgaccataacatcaccgaatcaaacgactgtctttataccaaatgatgtatcatcttataattataagaatattaacgattatgtaagttccattgttaattatgtaattgaatacgtatctgttgtagaatccaaatgtctgatcctatttacgagttataaaatgatgcatatggttcaagaattaataaatgaattgcctgaatttgaagattatgttgtattaacacaacaacagaaccaaaactataagattgtccaacaatttaatagttttaataaagccatattgttaggtacaggtacattttttgaaggcttcgattttcagtcaaatggcattaaatgtgtcatgattgctaaattaccgtttatgaaccaaaataatactaaatattggttgatggagtctgagtttacttctacattcaaagaatatgtgttacctgatgctgtgacacgctttagacaagggctaggtagattaattcgtagtgaaaatgataaaggcattatcgtatcttttgatgaccgtttaattcgtagtaattacaaacagttttttgaacaatcattagaacgatatcgtcagaaaaaaggggatattaagcaattttctacactccttaaaaaattaaaaaaagaaaatgctaagaaaccataaacatagcacaagcaactagaacttatatatggattttgttaaaatatataaggataagaaaagtagaatacactattataggagactggttatgaatacaacgataaaagaagcaaaacagtatattggccaagaagttacaatcggtgcttggttaacgaataaacgttcaagtggtaagattgctttcttacaattaagagatggcacaggatttatccaaggtgttgttgctaaagctgaagtagatgaagagatattccaaaaagcaaaagaaattacacaagagtcatcattatatgtgacaggtgtaattagtgaagataatcgttctgatatcggttacgaaatgcaagttaaatcaatagaagtaatatctgaagcacatgattatccaattacgcctaaaaatcatggtacagaatttttaatggatcatcgtcacctatggttacgttcaaaaaaacaacatgcggttatgaaaatcagaaatgaaattattcgtgccacatacgaattctttaatgataacggatttacaaaaattgatccgcctatcttaacagcaagtgcaccagaaggtacaagtgaattattccatacaaaatactttgaccaagatgctttcttatctcaaagtggccaactatatatggaagccgctgcaatggcacacggaagagtattctcatttggtcctacattccgtgcagaaaaatctaaaacacgtcgtcacttaattgaattctggatgatagaaccagaaatggcattttgtgaacacgcacaaagtttagaagtacaagaacaatatgtcactcatgttgttaaatcagtattgaatcattgtaaattagaactaaaagcgctagacagagatacatctaaattagaaaaagtaacaacaccattcccacgtataacttacgctgatgctgttattttcttaaaagaacaaggttttgatgatatagagtggggtgaagatttcggtgcaccacacgaaacagcaatcgctaatcactatgatttaccggtgttcatcacgaattacccaactaaaatcaaaccattctatatgcagcctaatccagaaaatgaggacactgttttatgtgcagacttaattgcaccagaaggttatggtgaaattataggtggttctgaacgtattaatgatcttgaattacttgaagaacgactaagtcaattcgaattagatgctgaaagttatagttattatttagatttacgtcgttatggtagtgtgccacatagtggctttggcttaggtttagaaagaactgtagcttggttatcaggcgttgaacacgttcgtgaaacagcaccattcccacgcttattaaaccgtttatacccataatttattttagaatatgtgtcaaaaacgtccagtctagttatcaatggctggacgtttttataacatgaatatagaacaggaggtatctatctttgaatagtgaacaacttaaaatacggcccgtcattattagacgtgaactgttagatcattataaccaactcgggataaatgaagctgaattggttatattaattaaactattacatgcctctgaatcttcaaacaaacaaccttctattgaatccttgcagcaagggacgacattcggctctagagaagtcacaactatcatccaaagtttaatacaacatgatttacttgaattaaaggttgagaaagatgaagaaggtaaatttactgaatatatgaacctcaaccaattctatgtgaaattaagtgagataatggaacaagtaaatattaaagtagaagaagaaaatacggaagttgaatttaatgttttatttcaacaaattgaacaagcctttggtaggccgttatctccgtttgaaatcgaaacgttaaaccaatggttagatattgataaacatgaattaagtgtcattcaagctgctctagatgaagcgacgagccagaataagttaagttttaaatatatcgatcgtattttattaaattggaaaaaaaataatgtaaaaacaattgaagattctaaaaaaattagtcgccaattcaatcaacctaaaatgaagcatacaattaaaaaagtgcctaaattcgattggctgaatggggagaatccaaatgataagtaataaaaaagcattagaaatggttgatgtcatagcaaatatgtttccaaatgctgaatgtgagctcaaacatgacaatcctttcgaattaacgattgctgtgttattatcagctcaaacgacggatgtttctgttaataaattaacaaaagatttatttcaaaaatacaaaacacctgaagattacttaaatgtagatatttctgaattagaaaatgatttgcgtaccattggtctatatagaaacaaagcgaaaaatattcaaaaattatgtcgttctttgttggatcaatttgatggtgaaattccacatacgcatgctgaattagaaagtttggctggcgtaggtagaaaaaccgctaatgtagttatgagtgttgcttttggcgaaccatctttagcagttgatacacacgttgaaagaatatctaaacgtttaggcatttgtagatggaaagataacgtgagacaagttgaagataagttatgccacgttgtaccaagagagcgctggaataaaacacaccaccaacttatattctttggtcgttatcactgtcttgctagaagtccaaagtgtgatgtttgtccgttatttaatgattgtagagaaggtcaaaaacgctataaagccaatttgaaagaggcgtaattttatgattacaaaagaagactttactgaattagaagctcaaattgatcaatatgcgaaatcaaagcaattgaaatcatcagaagctaaattaaaattagatgactattttgctttaatcgaacaatattttaaacagattaatcatatccaaactataaatttttcagatttagatgcataccctgtagtgccaatgaattttgaagaacgttatcattatatgattgctagaaaatatcattttatgggctacagtcaaatgaaaactttaaaatctgaacttataaaaatgaatgcttcttatcaaactccaagctaagaccgaaaattatagttactttgttcgtattgctcgattggtagataatttaaggcataaggcactctattttaaaactaggttatagtcaatttaaaatgaggtgtcttatttttgaatatgaacacacatttttcactaattttgtaacgaatgcatacagctagaaaaatagtataaaataagattctctagacttcgagacataccacaattctgctatgcgcagccgagatcataaacttctaaatataaagcgtacgcatccatatatgatggatgcgtacgctttattataattgctatttgtaatataagtacttattgcaaatgcagttatttaattaagtgattgctatcaaaaaatgaatacttagtgttatttaaagatatccttattttcaaaaaaatacccggtagccaaatgaaatggcataccgggtatgagtgtagctaaatgaattaacgtgctgcactttgttggttacttgagttgtttgtattactagttgaattattattacttgaattagaagatgatgaactgttactgctaccaccttgaccctgaggtttattactagtggtattatcatctggtttacctttaacagataaatcatcttttgagtctccagaaactgaatctggtttagagaaatctttgccatcttttggtgaaatactttccatgacatcttctaataagtattgtgggtattcttgttcttcatggcccacaaatgagtttgtaccgccttgtttaacttcattgaatcccatccatactgacatactgtatttaggtgtgaaaccattaatccaaacatctttcgctgcatcgtctggcagattatattgttggtaagtttgttcaccataagtacctgtaccagttttggctgctagattaacgccagatacaccatgaccgtatgcagaaccatatgcttcaaatgtacctttaagtacttctgctaacatatatgatgttgagtctttcatagcttttttactagtatgatcgtattcaaccgtttcgccatcttgtttgacaacttttttaatagagtgggcattgttatattcaccaccattagcaattgcagcaaatgcagaagctaattgagtaggagagaattcagatgctgaaccacctaatacttcagatggaccaatgtctccttcataatctaacccaacttttttagcaaaatcttttggtgcatcgtttccggcgttttctttagttgattgccatgctttaagtgctggaatattaaaactttcacgtaatgcatcataaagttttaccgtaccgtggctcttagtatcatagtttctaaatgttacaccatctacttgataagattcttcatcttgaatcgcatggttcgttgcccatgacatattttcaattgcaggaccatacgctaagaatggtttcagtgaagaaccagtagggtgggcatcagttgctaagtttctatctacaatatctttataatttctaccaccagatattgcgacaaggccaccattttcactatctacaatagaagaaccaacttgttggtcttcatttttataatagctaccattattcactcgatcttgtaatgtttgttgaacatctttgtccatattcgtataaatcttaacgccgctatttaatacagaacctaaatcttcatctttaaattctttattattcataagttcagattttacaaagtttacatatgaatcgtatgcctcgtttgaattatcttcacttacttcgcgatcttcagatgaacgttggaccagattgtcttgtaaagaagtattttgtgcttcttctttttgtttcttagtaattctattatgatattccattaaataaagtactgtatctttacgagactcagcttctttaggatgatcataaatgttataagtatttggtacttgtggtaaaccagcaagataagcagattccgctaaattcaagtctttcaaatctttattgaaataatatttagcagcagctttcacgccgtatacaccatcagagtagtaaattttatttaagtacatctcaaaaatttcatctttactatactcttgttctaatctgtaggacaagtaagcttcttgagctttacgtgcaattgatttttgatctgttaagaatgaacgtttaactacttgttgtgttaatgttgatgcaccttgtgaaccaaagccaccagtgacgttcttagctacagcaccaaagagacgtttgtaatcaagtgctccatgatcatagaatcgattatcctcagtagctaaaacagcttctttcattgtcttaggtacttcgtctaaatcgacatgctctcgtcgttgcccattatcgattgttttaactaaatcgccatctttatcataaatcttagctggcacgggatcttttaattttgcttcattaaatgcaggagatttccaagcataatatgcaaacaacaagattcctattaaagctagaacgataaaggctataattagaaacccaaatatcttaataatcgttcgttttatattcctattctttttttgctcggactttccattcttattattagattgagaagtcctctttttctccgtcatacgcggtcctcgctttcatctaatatcaacttatcaactgttttgagataattcaatcgtggttgatactgataaggaatatagtaaccattttttcttatttcttcaaccgttaccgactttttaatctcttgaatgtgtctctcccaaaactttttgaaatttgcatatgggagcaaatacacttcatcgagcgatttaaagcgaattaataaaaatacaaccccttgttgttgataacatgcttccatatgtcgaacttgatgttcatgcatattatttaaagggaatgatgttttattttttgtttcttttgcttcaaaatctaaataacgaccatgataaataccattatagtcagttgtcgacggcgttctaaaataagcctcatttattactgccttacttctcataggataatgaacattcactatctgtatcggggtaggcttcttatgtattacagcaatacctcgatttaaataataatcattcgatagttcgatatctttttcaagtgacatacctctgccaccataatcaattttactcgtttgtcccttatgagttcgtccgacctgagacttatttctattaaatggctttccatttggataattcatttattttcaccactttagtttggtcatccaaaacctgtttcattatacatgactttagcaaatttttccaaactatgaaatatgaaccaatgtatttataaatacatcacatacattttaacgtgctttgctcaattaaacaatatttgaaacaaaataaaatagttaatcatataaatgataaacgacactttaaaaatgacgaagtaggccatttatggtaaatttgtgaagtagggggaatcctcatgcaacaactattaatgcaattattaaatgatgttttgaaaatggtagaaaaatacgagactgtcaaatcaactggcgaagattacgatttttatgttgaggttgtaccattcacaaatgatattgatcaacaacttaaaaagctagttacatatgagcaacaagtaattcaattacaatatatgaataaacaaaaattcgatttacttatttcaaatattgaatctttatctgttgaatgtcactttaaacgtacgagcagaaaattatttaatgaaaaagtaaaggctgttcaatatgatttaagctacatacaaagaaatgagcaatttttatgattaaaactgtatatgttactggatataagtcgtttgaacttaatatttttaaagatgatgcacctgaagtttcctatttaaaaaaatttattgaacataaattaaaacagttgattgaagaaggattagaatgggtattgatacaaggacagatgggtatagagctatggacagcagaggtcgtgttagcgttgaaagcaacctatccagatttaaaattaggaattatcacaccgttttatgatcatattgatagatggaacgaacaaaatcaagcaaaatataatcatattgcgcatcatgctgattttgttgatagcgtattccattcttcatatgaagggcctcatcaatttaaacaaaccaatcaatttatgttagcacattctgatacaacgcttttgatttatgatgaggaacaagaagctagtccaaagttctttaagcagatgttagttgattttatggaaaaaacaaattatacttgtgatattgtgacgttcgatgagttaactgaattcatcaacgacttgcagtggtctcaagagcaaagtttcgaatgaggtggagaaaaatgtcagaagtttcattaaaattatcagcaaaagatatttatgaaaaagattttgaaaaaactatgacgcgtggttatagaagggaagaagtagatgctttcttagacgacatcatagctgattatcaaaaaatggcagatttagataatgaagtagttaaactttcagaagaaaacaacaaattaaaaaaagaacttgaagagttaagattacgtgtagcaacatcgagaccacaagaaaataaaaacttctcttcaaacaacaatgctacaactaagaataatagtagtaacaacaatgttgatatattaaaaagaatatccaacctagaaaaagctgttttcggtaaataatcaactattatcacatagagaatatgatgatgaccgtagatatagcaacatctacataaagataagttttgaattcgttcaaaacttatcttattttttatttgtttaggctataaaataatgatatacttctaaagatggtgtttcgggtaatcgctatagcgatatagaggaaagtccatgctcacacaatctgagatgattgtagtgttcgtgcttgatgaaacaataagtcaaggcattaagttgacggcaacgaaataacctaagtccttagataaggttagattagtttgaaagtgccacagtgacggagcttttgcagaaatgcaaaaggtggaacgcggtaaacccctcgagtgagcaatccaaattaggtaggagcacttatttaacggaattcaacgtatatataagacatacttttaaaagtatgtagacagatggttaccacctgcgtacgagtgtttctagtacacgttagcagtacaatggtacaaaacatggcttacagaaatatcatcactagacccaagctctcccaaatcggagagcttttttcattgctataatctattaaaaacctacgttccatacacatctttaggcaatgccatatctatttaaaataacttttgataaaataaaagcaaatcattataaagaaggagcaaaacaatgtatcaattactagcagtatgcccaatgggattagaagcagttgtagctaaggaaattcaggaattaggttacgacacaactgttgaaaatggtagaatcttttttgaaggcgacgaaactgccattgttaaatgtaatttatggttacgcacagcagatagaatcaaaattgttgttggccaatttaaagccacaacctttgatgaattatttgaaaaaacaaaggcactaccttgggaaacgctcattgaacaagatggtaatttcccagtacaaggtcgaagtgttaaatctacattatttagtgtacctgattgccaagccatcgtgaaaaaagcaatcgttgagcgtttgagacgtgcatatcaagcaagtggctggttaaatgaaacgggcgctaaatatccaattgaagtagccattttaaaagataatgcacttttaactatagatacttctggttcaggtttaaataaacgtggttatcgtttagcgcaaggtgaagctcctatcaaagaaacacttgctgctagccttatccgtttagcgaactggacaggtgacacacctttagtggatccattttgtggttctggtacgatagcaattgaagcatgtttaatcgctcaaaatattgcgcctggatttaaccgtgatttcgtttctgagaattgggatattatgccagatcgtttatatgatgaaatgagagatgaagctgatcaacaagcgaattatgaccgtaaattagaaatttatgcatctgatatcgattctgaaatgatagaaatagcacgaagaaatgcagaagaagttggattagccgacatcattcagtttagtgttaaagatgttaatacacttaccattgatgaagataaacctatggctttaataggcaatccaccttatggtgaacgtatcggggatagagataaagtagaagaaatgtaccgctacatcggagaacttatgcaacaacattcgcaactatctacatatattcttacaagtagtacagaattcgaatttttagtaaataaaaaagcgactaaacgtagaaaactatttaatggttatattgaatgtacatattaccaatattggggagacaaaaagcctcgttcttagtttttagtgcaattagtattttggaaagcggtgactcaattgaatacagaatttaaaaaaggctttttctttgcgttcggagcatatattctttggggtatactccctatatattaggaattaattagtgatattggtgcatttgaaatattagcatttagaattgtattatcgatggtgtttatgttattcatcttaatcataacgaaaaatacggctccatttaaacgggatattaaacaactttttacaaatcctatccaacttattgctatcattgcagcgggttatgttattacaataaattggggtacttttatatgggccgttacaaatggacatgtacttcagtcaagtttaggttattatatcaatccactggtcagtattttgttggcgcttatatttttaaaagaacgttttaataagcttgaatggatagccataggcctagcggttatcggagtactctatatgacgttgaaaatgggcgtcttcccaggcatttcattgttacttgcaggttcttttggtgtctatggattaattaaaaaaatagtccctatcgatgcaataagtagcattacaattgaatgtattgttactgctcccgctggattcatttatttatggtatatttggcaaaatggtggtttatcttttgggatgaatagttcttcattttggttaatcttttcaggtgcggttacagctgtaccacttattttgttctcggcaggtgcaagacgtattcctttatctttaactggttttattcagtacataggaccaactttaatgtttatactaggaatatttttattcaaagaaccatttgatattgatcaattaatcacatttgtatttatatggattggtattattatatatagtatttctcaatattttaaaattaagaaagataaaaatccgattattcattagccttactaaaagtctctgttcgtcgttgcgaataagaggcttttttaataccttaaaatctaagcgtatacaatcgaattcattgattacgtttaagtagttagaaataggataactataatattgtgagtactatgaagtgtcattaaacagaaaatgtgaactttcaagcatttataattataatataaacgaacctaaaaatatcttataaacgatatggacaacatatctcgtattacaataaaagaaatggagtgattaaatgactaaagtattaatattgggagctaatggtgctgtttctaaagcggcgatcaattcatttttagaaaacacttcctatactttgcgcttatttttaagagatgcaaatcgattacctgattacgcttctgatcgtatacgcgttagagaaggtgacgcaacaaattttgaagatgtaaatcgtgctatggaagacgttgatatcgttttagcttcgttatctggtgaattagataaagaagcacagaccattgtagatgcaatgaatgcgaataatgtcaaaagacttattttcgttacttccattggtatatataatgaagtaccagggaatttcggattatgggtacaagatcaaattagtgattatttagtaatttatagaaaagcagccgatatcattgaacaaactgatttagattacactatttttagacctgcctggttaacacatacgaacgaaatcgattatgaaatcaccaaaaaagatgaaccttttaaagggacagaagtttctagaaagagtgtggcagccattgcagtacaaattgctaaagatccagccctttattcaagagataatatagggattaataaacccaatactgattttgacaaacctagatggaagtagaataagtcaattttaaaataattatgattcaagctaaagcacatgcataattactaataacttaataaattgataaaaaagactgagacataaattaatgtttcagtttttttatgtttaaaccatccttagcgcatgattataattttaaatattaacttattgaagtcgtagcattttcactgctacttcaacatctttaaattcactaatttgtcgaattccatgcaagtccagattattgcaacgacagagcgcatgaatacacataattttatatatagcgttttcaaggtggaataatacacttgtagtcatggttttttggagtattataattattgtattgtacaatattttttatttaaaaaatcgaaaggagttttattctatgttaaaaatatttttgctgtttgtctccctaattttaacgtcagttattttcgctcctactacttatgccacaaatccgttaataaattttaatgagtctcattctgctgtgatgacacaaactactaaaataaatgatatattactaaatgcgaatcagccttcccaaaataaagatacttcaacacttattaattaccccgatgtcaatcaatatataattcaaaataatataaatcactcaaacgtgataaaggacagtagaatgaatacacttcctaaattgccatataaatatggtacttataaaggtgttgtcattcatgaagtaggcgaagataatcgaacgctacaacagtgggttgatcggatgtatgacacatataacactgcctttgtacatgcatttgtagataacaaagaaattcatcttaccgcaccatctgaatactacgtttggggtgcaggcaaagcgactaatccatatttttatcagatagaggttgtgcgtgcttatacatttgacgactttgcaagatcagtaaataatcaagcgtggcttgctacatatatgttaaaacaaaatggtttgacccctagctttgcagataagaataaggggataggtacaatcattagtcataatgcagtaagacagtattggggaggtacgacacatgttgatactatcgcttattatggaaaatggggatatgatatgcaacaatttttcgaactagtgacctatcattataatcatatgtaagttatgcctagtcattcatttgcactaaattatttcataataaaatacagtggataattaagatacttaaaaaaagtgttatttatagttcaacaaaatagccttttcttatatagctataatatccaatgttaaaagtggggtgcataaacaaatgccccctgttgttttgagatgtaaagtgaatatatttaaaatatggtgtagttagcatgacaataaataattttgtaatgtcataaattgaatatggtgcataaaaatatagactgtcactttaagtaattatttattcaatgactaatgctaattaacttcaaaaaagttctaagttgtttgataaaatttgcaatgaaacaatttaatttcaaatacttactttagacatgcaatcatttgttatacaataaggattaattacatataagtaataaaggggatacgaaagatgtctaatactgagcaactcgatattttatataaattaaaaaaagaagtagaaaaatctaaaaacgatagactggttcacattatcaatcaggttattaaaaaggtgtttttagaacaatatacagcgacatttgttggtcacttctcggctggtaaatccacattaatcaatttgttattagaagaaagtattttaccaagctcacctgtaccaactactagtaataccgcaattgtatctgttgctgaacaacctggtatcattgctaatttaagccatcaacaatacacaatcttaaataactacgatgaagtgaaacaaatgaatcgcgagaatttcgatgtagaatctgttgaaattaaatttccatcaactaagtttaataaaggcttcacattacaagatacacctggggtagattcaaatgttgcaacgcaccaatctagcactgaagaatttatgtatacaagtaatatattattttatactgtagattataatcacgtacaatcagcattaaactttcagtttatgaaacaacttaatcaagcaggtgtaccagtcgtatttgtgataaatcagatagataagcataatgaagaagaaattagtttcgaaacatttaagcgtcgtgtagataaatccatcaatgagtgggaaatcgacctagatcaaacattttacgtttcaaaatatgaacatgagcataatgaaatcacgtcactttctaattatttaatagagaaagatacgcatcgtgaatctatagctgcttatgtagaacacattgttaaatttattactaacgaacaattatcttatgtacaatatgaaattcaggatttactagataagttagatattaatgaagcggattttgatcaagcttatcttaatttcaaacaacatcaggtagttagtgaagaagccaaactgctaaacaatcctgaagaattatatgattttttaaagcaaaagagaaaagcaatcatcgataatgcttatatcatgacgcatgacacaagagaaaaaatcagaatatacttagaaagtcgcacaaaagattttagtgttggcggattatttaataaaaagaaaaagacagaagaagaacaacaacgacgattaactacagtcttagaacacttacaagataaagttaatcaagaaatacgacaaccattaagagaagatatgtcatttttaacgagattcatcaattcatctgatataaatgatgagattttaaatcaacattacactatcccttcatcattgattaacgatttatatcaaatgcaaataacgattagtaatcaatatgtattaactttctgcgacgatttgatgaaagcacttaaacaacatattgctaaagcatcagatccattatttaaaaaagctataagccatgcgcaagctaatgatattggtacagaacaagcagatgattacaatgattatgagaagtttatagaaatgcgtagcttaagagagtcattagaaacacaaaactatatgcattactatattcacatggacgattctcttgataaattgatagatagaaaagaaattactttcacaccgaaaaacaacaaaactaatctaaagaaacaaacaaaatctgatgtaagtaaacagcagaagcattccaataatactcaaaatattaaaaatgccttgaataccataaaagatgtgccattattcgaacaaacaaaatcagatatagaagaaacgcttaagagattagataagaaaataataaaaattggtgtttttggcacatttagtgcaggtaaaagtagtttaatcaatgcactcttaggagatgcatacttagtgagttcgcccaacccaacgacagctgcaatgacccaattaacttatggtcatgaaagccaaatcacattaaaatcctctaaacaattattagaagaattaaatcatgtgtttcaagtagaaaataaaacatttaaaacaattgaagattttctatctaaaaacacgaataaattgaaagcaacattagagaaaaataagttagcttttgtgaacgctgttgaaaagcattacgatatgtaccaagacatgctcaaagatgggcaaatacatacgattgcacaagatgaaattaaaaagtggagtgcagaggatgaatatgcaacgtttgttaatacagttcatctaaatttacctttagaatggttgaaagataaaattatagtagattcattaggtttacattcaaataatcagcgtcatacgaatgagacagaaaaagtactaacttcttccgatttaatactttatgttagttattttaatcattcatttacggaaaatgataaacgttttattgaacatatgaaagaaatgaatcaattgaacgaaaatcaggcctttaaaatgattgtcaatgctactgatttagcagaaacggaagaggatttaaatgctgttattgagtatgtcggtgatgctttaagtcaagtcaatatggattcagatatttttgcagtatcaagtagagaagcactgaaatcaggcaatgagggtatcaaacgccttcaagacagtattcagcactttactcaaatcgaatccaaagatatcttacagcaacaaatgttaaatcaattaaaaaatatttctgaagcttatgagcaaatgattgaagaatttaacaataataaaaaacaaattgaacaaagaaaacaaaagctacaagaatataaaaattcttcaattttcaacaataatatattacaaattgctgaacaacgcacatcaaatgaagtagaagatcaactataccatttaaatgaacgattaaaactacaattacaagacgaggttaaatctatttacaatggacaaatgacaaaaaatagtaattttaatgatgaaaaacgtcaatcaaccaaaatttacttagatcagattcaccaacgtctatatttagaacagtcccttttagtagaacgtatcaagaagtattttcatgaacaagtacatgcagagattgcaccattaaaacaaaagcttgaacaagtacatgtatttatacaacctgagtttagtcaagaaatgattgaacttgatgacccttatttaaaaattgatttagaaaccatgctcaatgctttaccaaaaggtttaactaagaaaacgattttgcaacctaaatctcaaagtgcgattcaagaacaaatcacacacgaaaccatagcacttttagcaccttgtattgcaaatttaagacaagcaatgagcgacattgtctctacaatggattacaatgctgaaactaaattcaaaacattagaaaaagaagcgcatcatcaaattcaagaactattagcatttgaaatggacgacgctcttattaaacaattacaagaaacaaacgaaaaattaaaagcattattgtaaaaatagaaagaggacacaatatgaccaaaaaaatattactaatagacggcatggctttattatttcgccacttctttgcaacaagttcgcataaacaatttatgagaaattcatcaggtatacctacaaatggtgttcaaggatttgttcgccatgtgtttaccgctatcaatgaaatacagccttctcatgtcgcagtgtgctgggatatgggtaaatcaacatttagaaatgatatgtttgatggatataaacaaaatagacctgcaccaccagaagaactgattccacaatttgactatgtcaaagaagtttctaatcaatttggatttgtaaatattggcgttcaaaattatgaagctgatgatgttatcggtacacttgcacaacaatattctgatcaaaatcaagtttatgtcgtaacaggtgataaagatattttgcaatgtattaatcctaatgtagaaatatggctaactaaaaaaggctttaatatttataaccgctatactttagatcgttttcaaagtgaatacgggttgaatcctttacagttaatcgatgtcaaagcatttatgggagacacagctgatggttatccaggtgtgaaagggattggtgaaaaaacagcaattaaactcattcaaaatcacgggtctgtagaatctgttttaaatgcattagaccaattaacaccaggtcaaagaactaaaatcgaagctaatatcgataaccttaaattgtcaaaaacattagcagaaattcataccaaagtgcctttaaatacagtcgatttgctggataagatgcaatttggaacagaacttactaaaattcttaatatatgtaaagaacatgagttgtatgtttctggtaaatatctatccacacatttcagttaaattcataatttaactatcataacaatgtgaataatgtagtaggcaagacacaggaaaagattttgatagaaaatgtttttttgcaccaaatgattaaaggtggctaatttaaaaatttacaaacctaactcatttttttgaatcgacaaataagatgataaagtgcaggattatacagttatttctttatttaaaaacgagactgaggcaactattaatgtctcagtctcgtttttcgattcataaccgcttctttgtagtagctttagatagcgttatgattttttgttatgtttggttatttgatataaactttgttttgcatgatgattcgcttctttattttggtttctcggtacccaacgaacaaagagtaattcaaatttttgttctaattttataatttcattatagtaagatttgaatttttcattttttacattccctctattaaaactatcttcgataagtttagaatccgtatatacaaggccagttgttatattatgtgctatagcacattccaacgcgaactgaaacgatgcccattcagcactatggttatccatttgacccaatgatttcgtgtaatgaaatcgttcttcttctgtgataatgacaactgcactggcactttcaccagggttgccagctgttgcagcatcaaaataaattttcgccattcatatcatccttataactatatttacatttatactaccaaacaaatggtacttgttctatataagtgaaacgatactaatcggatatttagacattttgacgtaaggtgatgtataataaataacatactataaaggtcggaattaaaggaggctgttatattgaaaaatatgttcatcatacatggttaccaagctagcaccgaaaatcattggtttgaatggttagcaacacagatgaaatcctatgattatcatactgaaatcgtatatttaccaaatactaataaccccgatttagatgcttgggacagcgcaattcaacatagtttaaatcataaactcgataaggattctatcattgttgctcatagcctgggtgtggttactgtcttaaattatttatcaaaagaaaaggtatttagtaatataaaagggctgtttttaatttcaggtttcaatgaacctttacacaatctccctgaattgaatcaatttatcaatcaaacacaagtacaatttgaaaatattaatgcgcaacatatcataaccatagctggagataatgacccagttgtcgacataaatgcaacaaaccgattatctcaacaattaaatacagaaacagtcgaactgcatcataatggacacttccaagattgcgatggttatcttacttttgattttcttaaaaatcaaatcactgctattttaaataataaaaactctgaaattggcatttaaccaatttcagagttttttaataaccttcatctaatttactaatttttcctttacgatacatggatttcgcccagtaaccaaatggtacattaaatatcgttgagattactttcaatagatacgtagtaataaaaatttcaaatactgctgcatttggcattgaaccataaaatgcaatggttacaaataaagcagtgtcgattatgttacttatgatcgtactaccatatgctctaatgataaatgttttatctgagctaaacactttttttattaacgagaagagtagtacatctaaatgttgtccgattatataggcaaccactgatcccaatgcaattcttggcacaagattaaatattgattccaacgcaccttgcgaagtatcaatagatgatggtgtaaaatgcagcgacatttgcattacgataatcataacaagtgttgaactaaagccaatccagactgcacgctttgcaacttttctaccataaatatcatttaaaatatctgtggcaagatatatagaagcaaacattacattacctaatgttgctgaaatagtaaatatgtcgattgttttaagaacttggatattagcaagtacagttccaattgcaatccatgcgattaatccctgtttcccaaacaagcgatacatagctactaataataaaaaggtaactaaaaatgtcagtacaccaaatatttcgttaaacaatttaaattcctcctaaattttgataatgcgggagtttagaaaccgcaaaataaacaactaagtaattttatcagaaaaaattaaaaatacaagtgtgtttattcatatcgtacataaaaagttgaatatctattttcataaatttaaagattaaacaatcctagttacaaatgatataatgtcttcaagtgtcaaatcattataaaatgaatcaatcgatagaaatatgatattttaagtaatataggagcgtgacaaacattcttacttattctgaaaaagaagctatggcttcaatagatgatttaatgaacacttattgcaaatcatgtttgctcaaacatcatataagaaagtcagaaggtaaaacacaagcacatcatttttgtataaatgaatgttcaatcggcaaagaaattaaacaattaggaaatgagttacaataattaggaggcattttattatggagattttagaagtatcacaaacaccaaacccaaatacaatgaaaatcgttttacaattatcaggtgaagattacaaaccgaatacctttactgcagtaaaagataatcaacctgagtttattaacgatattttacaaatcgaaggaataaaatctattttccaagcaatgaattttatctccgtagataaaaaggcggactatgagtgggaaacactattacctgaagtaactaaaaccttagaagaaatataaaaaggagttttctgaatggaaattgtacgtgtcgaaccaacgcccagtcccaacacaatgaaaattgttttgaatgagaaaagaaaagataataagtcaaatacgtatacaactattcttgataatcagcccaagtttatcaatgatgtattagcagttgatggtgtgaaatctatattttacgttatggattttttagctgtagataaaaagcccaaatatgattgggaagttttattacctaaagtaacagcaacattaagcgacgaatctgaatctattgatacaccagcaccagatgaacactttggcgaagttaaagctgaagtacttcagttcaaagggattccatatcaggttaaacttacttctagttccgaagaaaaacgtaagcaattacctgaagtgtatattgatagtatgcttgcagctcaaaaagatgatgacaatattgttttccaacgtaaatgggaagacttaggtatacgttatggtgaattagatgatattatgtctgaagtcactgaagaaatcctagcactttatcctgaaaaagatttaaaccatcttgtagaaaatgctttaaatacagatgtcgttattcctgaaaaaaaataccaacatgtgacgcttgagacttatcaagcaactgatgattggaaagaacgcttaagaatgttaaaagctttcccaacaccaacagagagagatttcccattattaggtgatgctgttagtgaagaagagaaaacaccattaagacgtgaagcgatcgtgttgcttggtatgatagaagataaagcagtattaccttatttatttaaaggattacatgataaaagtccagcagtcagaagaacagctggtgattgtttaagcgatttaggattcaaacaagctttgcctgaaatggaaaaagcattagatgatccccataaaatagtaagatggcgagctgctatgtttatatttgatgaaggcggtcctgaacaacttgatgcacttcgcacacatgaaaatgaccctgcatatgaagttaaacttcaaatagaaatggcaatagcaagaattgaaaatggtgatgaagcattaggttctgtgtggaaacaaattgctaatagaaataaatcgtaataatttgatgatatgaatttataaaggagtgttttaaatgaatgcatatgaagcatacatgaatgaacttgcaactcaaatgcgtagtgaattaactggacgtgatttcaaaagtttagaaaccgcagatgaagtatctaactttatgacaaatgtgggtagtgacgatacaacatttgttgttattaattcaacatgtggttgtgccgctggtttagcaagaccagcggctgttacagttgtagaacaaaatgataaaaaacctacaaataaagtaacagtattcgcaggtcaagataaagaagctactgcaacaatgcgtgattatatccaacaggttccatctagtccatcctatgcgcttttcaaaggacaagaattgaaacattttatacctcgtgaacacattgaaggtagagatattcaagatatttgtatggacattaaagacgcatttgacgattactgctaaatggttcgtatggttatataaatatcgctgttaaatcgtattgaataacatagcgtaaaaattcattaaatggtcattatgccaacttactgtgtctaaacaagccaataagatatagtaagttggcatttattccataaaaataagtactaacgcgtataacgtttacaaaaaatgatgtataatttactcaaagtacattatttttacataattaatgttaaatcctttaacttataacaattatccaataagatacaaataaaattaattttggaaggagtggattaaatgttaaatgcttttgatcaagcgtatcatcaattatgtgaagaaattttagaaatcggtaaacaaaagaatgatcgcacaaatactggaaccatctcaaaatttggtcaccaactgaggtttgatttatcaaaaggcttcccattactaacaactaaaaaagtatcatttaaattaattgctacagagctcttatggtttatcaaaggagatacaaatattaagtatttacttcaatataataacaacatttggaatgagtgggcattcgaaaaatttgttcaatccaaagactataacggacctgacatgactgattttggccatagggcacaaaaagacgagtcctttaacctaatctataaagacgaaatgaaccaatttaaaaaacgtattttaaatgatgatgattttgctaaaaaatatggtgatttaggtaatgtttatggtaaacaatggcgtgattgggaagataaatatggtaatcattatgatcaattaaaaacggtgatcaatcaaattaaaacgaatcctaattcaagacgtcatatcgtatctgcatggaatccaacagaaattgatacaatggcgttaccaccttgtcatacaatgtttcagttttatgttcaagatggcaaattaagttgtcaattataccaaagaagtgcagacatctttttaggggttccttttaacatcgcaagttatagtttattaactcacctcatcgcgaaagaatgtggccttgaagttggagaatttgtacacacctttggtgatgcacatatatactctaatcatatcgaagctattgagacacaattagcacgagaaagctataatccaccaacacttaatatcaattcagatgcatctatttttgatattgattacgaggatttagaaattgttgattatgaatcacatccagcgattaaagcacccatcgcagtttaaatgggaaatgacttaaaaacatcaataatttattatataatgcactttgtgtttcatattaaactgttttcatttcaatattaggaggaacattatgacactttcaatacttgtagcccatgatcaacaacgggttattggcgtaaataaccaattgccttggcatttacctagtgatttaaagcacgttaagtcgttaactactggaaatacgcttgtcatgggtcgtgcaacatttgaatctatcgggaaacctcttcctaatagaagaaatgttgtgttaactagaaataaatcatttaaaccagagggtgtggatgttatccattctttcgaagaaatctacgacttacctggccatgtttttatatttggtggccagtccttatttgaagaaatgatagataaggttgatgatatgtatattactgttattgaagataaatataacggtgatacttttttcccaccatatacttttaaagactgggaagtcgcatcatcaaataaaggtgtattggatgaaaaaaatacgattcctcatacctttttacatttaatccgtaagggaacttcataggaggaaatttatgataaaaaagaaaattgttactgattcaacatctgatttatcacatgaatatttaaatgaaaataatattcatgtgatacctcttaatttaacaattgatggtgaatcctacattgaccaaatagatatatcgtcggaagaatatattcaaaaactggaagaaaatgctgatactaaaacaagtcaacctgctatcggtaaattcattgaattatacgataaactaggcgaagatggttctgaaatcataagcattcatatgacatcaggtttaagcggaacttatcatactgcactgcaagctagcgaaatgactgatagtaaagttactgtcattgattctaagtctatttcttttggtttaggttaccaagtgcaacacattgttgattggaataatactggactatcaacaaatgaaatcgttgaaaacattgttgaactacaaaaaaacattaaactttatgttgttataggacaattaaaccaattaattaaaggcggacgtattagcaaaacgaaaggtttaattggtaatatgatgaaaatcaaaccaatcggaacactcgaagacggaaagattgaattaattcataattctcgaacacaaaatgcaagtgttcagttcctcaaaaaagaagtgagcgcgtttatcggtgataaaaatgtaaaatctatcggtattgcacatgcaaatattattgaattcgtagacaaagtaaaaaaacatttttcagaagagttcaactttacaaaattcgacacgaacgttacaacacctatcatttcaacacatacaggacaaggtgctatcggtttagtcgtattacgatcataaagtactacttcaaagcgcgctatgactatactcaaaatgaaattggtcttatttaatatataaacagtttcatagcaaatcgcttaaaataatggtaactttatgacaaaatagatataggaggtatattatggcttatgcgacattagcaggaggatgtttttggtgtttagttaaaccattcacttcatatcctggtatcgaaaacgttgtttctggttatagtggtggacatacagataacccaacttatgaaagtgtaagtacaaatcaaactgggcatgtcgaggcagtccaaattacttataactcagaaattacttccttcgaaaatatattagacgtttatttcaaaacgtttgatcctactgataacggtggtcaattttttgatcgtggagaacattatgagcctgctattttttatcatgatgaaaatcagaaaaaagcagccgaagctaaaattcaacaattaaatgaacaaggtatctttaacaaacctgtcattacacccattaaaccatataaaaacttttatccagctgaaacctatcatcaggattactataaaaagaatccattgcattatgaacagtatcaacgtggatcaggtcggaaaaattttatagaaaagcattgggggaaacaaaatgattaaaaagaataaaaatgatttaaatgaaatggagtatttagttacacaagaaaatggtacagaaccgccatttcaaaacgaatactggaaccactttgaaaaaggtatttacgttgataaaatttcaggtaaaccattattcacttctgaagaaaaattcgaatcagattgtggttggccaagtttttctaaggcattagccgatgaagaaatcgttgaattagtcgacaaaacatttggcatggtgcgcactgaagtacgttctgaagatgcaaatagccatttaggtcacgtattcaatgacggaccaaaagaaagcggcggtctgagatattgcattaattcagcagctgtacaatttataccatatgaaaaattagaagaactaggatatggagatttaataccacattttgaaaaataaggagcgaacatattatgtttaaaaaattatttggtaaaggcaaagaggtcaataaagaaagcgcgatttatgcaccaatcactggggaatatgtaaaaatcgaagatataccagatccagtatttgctcaaaaaatgatgggtgaaggctttggtataaatccaacagaaggtgaagttgtttcaccaatcgatggtaaggtagataatgttttcccaacgaaacatgctattggattaaaagctgaaaatggcctagaattacttgttcatattggtcttgataccgtgcaattagatggtgaaggctttgacattctagttgaaagtggcgacgttgttaacgttggagacccattattaaaatttgatttagactatataaaagaaaatgcaaaatcagttgtttcaccaattattatcacaaattctgacaacacagcatctatttcagtggctgatgtaacaactttgactaaaggtgaaactaaaattgttgatgtgacaatgaactaatgaaagaccattcattttatcattttgcccttacagcacgtgggcgtaaagatgaaaaaggtgaattagcagaagaaatatttgatgatttatcttttccaaaacatgaaaaagactttcatatactgtcagattatatagaaacacaagggcattatactatttcattatccgtttttgatgatttatacgaggaatataccgaatggttaaaattttaattactttaacatttgagtagcacgattaaaatatattaaaataataaggtatcatttgttgctgggattaatctaaatgattcaatcccagctcattttatttgtaatgattttttacatatgtattggaagtgattaaatgtcagaaagtaaagacacaactgaagtgaatcaagaagtaaatgaaaaagcatcatcgcaatcaacaaagaaacaaataaatttcaaacgtagtcactttattattatattaatagttacaatacttgtaactgctatgattgcagtatttgcaacgattggcatcagtcattggacaagtggtttaaatagtgatcaacgtgatgagatgaaaaaagtagagcaagtttatcaaacactagatgatgaatactataaagatactagttcagaagagctggggacagcagcgattgatggtatggtaaaaaaattggatgacccttattcagactatatgaccaaaaaagaaactaaatcatttaatgaagatgtatcaggtgattttgtaggtattggggctgaaatgcaaaagaaagggaatcaaattcaaattacaagccctatgaaacaatcacctgctgaaaaggccggaattcagcctaaagatgtggttactaaagtgaatggtaaatcgattaaaggacagcctttagaagcaattgttaaaaaagttagaggaaaacaaggtacaaaagtaacactaaccattgaacgcggtgggcaagctcacgacatcacaataaaacgagataaaattcatgtcaaaagtgttgaataccaaaaacatggcgatgtcggtgtctttactatcaataaattccaaaatagtacatcaggcgaattaaaatcttccatcattaaagcacacaaagatggcatccgtaaaattgtattggatttacgtaataatcctggaggcttattagatgaagctgttaaaatggcaaacattttcattgataaaaatgaaacagttgttcaattagaaaaaggcaaacataaagaagcaattaaggcttcaaatgatgcctcaaaagaagccaaagatatggatgtttctattttagtaaataaaggctcagctagtgcttcagaagttttcacaggtgctatgaaagattataataaagccaaagtttatggttcaaaaacatttggtaaaggcattgtgcagactacacgagaatttgaagatggttcattattaaaattcactaatatgaaatggttaacgccaaaatctcattatattcatggaaaaggcattactcctgataagaaaatagaagaacctgcatatcaatcattaaatgttatcccaagcaataaaacatatcagttgggtgacgatgataaaaatgttaaaacaatgaaggtgggattgaatgcattaggctatcatattaataatcagtctactgaatttgatagcgaactagaggatgcactcaaatccttccaaaagaaaaataatttagatgtaaatggcacatttaacaagtcaacgaatgaaaaattcacacagcaacttgttgaaaaagcaaacaaagaagacacggtattaaatgagcttttaaaaaaactaaattaatttaagaggagtcatcggtttatgattagaaaagcaaataaaaatgatttatctagtattttaaacattgtagaagaagctaaaactattatgaagcaagacaacaacaatcaatgggatgaacattatcctttagaagaacattttgaagaagatattgaaaaagacacactttttgttctagaagaaaattctattatttatgcttttatagttgtcgaccaacagcaatcagaatggtatgatgaattagaatggccaattgacagaaaaggtgcctatgttattcatagattggcaggatcatctgaatataaaggtactgcaacgcaactatttgattttgcagttaatttagcactggatcataatattcatgtgttattaaccgatacatttgctttaaataagcgcgcacaaggactgtttactaaatttggctttagcaaagtaggcgaagcaaaaattgattatcatccttttaataaaggtgaaccattttatgcctattataaaaatttagaagaatagaggttatattatgacgaaaatcgcatttaccggtggaggtacagttggacatgtttccgtaaacctaagtttgattccaactgcaatagaagaaggatacgataccttttatatcggatcaaaaaatgggattgaacgtgaaatgattgaatctcaattaccttcaattaaataccactctatatctagtggtaaattaagaaggtatatttcttgggataatattaaagatatatttaaggtgttaaaaggtgtattagatgctagaagtgtgctaaaaaaagaaaagcctgatttactattttctaaagggggatttgtttcagtaccagtcgttattgctgcaaaatctttaaaaatccctacgattatacatgaatctgatttaacacctggtttagcaaataaaatctcattaaaattcgctaaaaaaatatatactacctttgaagatacattaaattatttacctaaagataaagcagattttgttggtgcaacagtgagagaagacttaaaaactggagataaacatagaggttatcaactgacagaatttaataatgataaaaaagtattattagtcatgggtggcagtctaggcagtaaaaaattgaatgacattataagacaaaatctcgagacacttcaagagacttaccaagtcattcatttaactggaaaagggctattagacaattcatatgttggcactaaagattacattcaatttgaatttgttaaagatgatttaacggatttacttgctattacagatacagtgattagtcgtgctggttctaacgctatctatgaatttttagcgctacgcattccaatgttattaattcctttaggtttagatcaatcacgtggcgaccaaattgacaatgctaaacattttgaatcaaaaggatttggtaaaacaattctcgaagatacattaactgaaaatgaattaaaaacacaattgagagaaattgaaaccaatcgcgatgatatcattaaacaaatgcaaacatataaagaaagctttacgcgtcaggatttattccaaaagataataaacgatgctttaagcgaataggaggtacatgcaatgagtcgttggaaaagaatatcattactcattatttttacgttaatatttggcatcattgcattcttccacgaatcaagactgggaaagtggattgataatgaagtatatgagttcatttattcttctaaaagtttcatcaccacaacgatatttctcggtgtaaccaaagttggagaagtttgggcaatggtttgtttatctctgttgctcgttgcttatttaatgttaaaacgtttaaatattgaggctttatttttcgcaattgcaatgagtttatcgagtacattaaacccattacttaaaaatatctttgatagagaacgtccaacgctacttcgacttattgatatctcaggatttagtttcccgagtggtcatgcgatgggttctacagcattctttggaagtacgatatatatcgccaatcgagttatgaagggtaaatctaaagcctttatgattggtctctcagctttatttatcattatgatatcgtcatcaagagtttatcttggtgtacactatcctacagatattatagcaggtattattggtggcgcattctgtgtcgtattatcaacattaatattacgccataaattgcaagtataattccattcaattcaacttatgtgcatccatagtgtctgatgtaacttataattcatttaaaaacacagtaaaaaagcagttaggtgaataaattcatctaactgcttttatgtgtcaaaatttattataaaaaccgatttcacaatgtaaaaccggtttttatattcacgttgtctcgcaacgttagtcttttacgggcatataaaaggggatgtttttgaaaatgatcaatccaaataagaacgaaatatgtgtggggggaatgtcttattttcggtattgataatcattttcaattacattatacaacaatgagaatgattgtcaattaaattcgaataattttttcaaattttatgaaatacctatatattacaataaaagtgattaaaatcatgaagtattttaaaaacattttgaaatttttatgcaataactttctacaaacaagcatttattataatatataatttgaggtgctacatatgacaaaaatcttaatagtagaagacgagcaaaaccttgcgcgttttatagagcttgaacttgaacatgaaaattatgacgtagatattgaatacgatgggaagcctggtttagaaaaagcattatcaaatacttatgatttaattcttttagacttaatgcttccaaatataaatggtttagaaatttgtcgtcagattcgtcaaaatcaaactacacctatcattatcatcactgctaaaagtgatacttacgataaggtggctggtttggattacggtgcggatgattatatcgttaaaccgtttgatatagaagaattattagcaagaatcagagctatgttacgaagacaaccacaaaagaatctaatcgatatcaaaggcatcattatagataaagatgcttttaaagtcactgtggatggacaaccacttgatttaacaaaaacagaatatgatttgttatttttactagctgaaaacagaaaccacgttctgcaaagggaacaaatcattacggacgtatggggatacgatacagaagtagaaacaaatgtagtagatgtttacattcgatatttaagaaacaaattaaaaccctttggtaaagataagtgtatcgaaacagtacgcggtgtagggtacgtggtaagacaatgaaacaacgtaaacttaaaactaaatggatgttgattactacgacgattacgtttttaaccatttttctttttagcatcataatcattttcttcctcagtacttcattaagacataatgaagtagatgaggctgaacgtagttcggaagatatagttaaattatttgaatctaaacaaattgaacacgtcacaccacttgatttaaatgcatccttaggtaattttcaaaaagtcatattatttaatgaagatggtcacaaattaatggaaacatcaaatgataactccattacgttttctccgaatatcgtaccgacaaatgtaaatcgtatagcagttaaaagtgatcacaaaaaagattatctcatcatcacagatcatattgagtcaccaaaatttaatggttacagtgtgatagtgcattctttagaagactataaagcacttgtaaactctttatattttatcgctctaatatttggtgtgatagcaacgtttataactgcaattattagttatttcttttcttcgcaaattacaaaaccattaatattgatgtcgaataagatgcaacaaattcgaagagatggtttccaagaaaaagtagaattaagtacaaattacgaagaaacagacaacttaattgtgacatttaatgagatgatgctccaattggaagaatcttttaatcaacagcgacaatttgtcgaagatgcgtcacatgaattacgtactcccttacagatcattcaaggccatcttaatctcatcaatcgctggggtaaaaaagatgctgctatattagaagagtctttagatatttcattagaagaaatgacaagaattacaaaacttgtagaagaactattattacttacaaaagacaataataacagtagagacggtgaaattgaaaatgttgagataaatcaagagattgcatctcgaattaaatctttatcacaattgcacagtgattatacatttgaattcgatgcgtttcctaaaccattaaacataaaaattgatcgttatcaatttgaacaaatgttgatcatctttattgataatgctatgaaatatgatcagataaataaatacattcagatacaaacaaagttgagaaacaaacaaatttctattgaaattactgatcacggtgtgggtatacctaaagaagatatagaatttatttttgatagattttatagagttgataaatcacgttctcgcaaattaggtggtaatggattgggattatctatcgctaaaaaaatcatagaactaaataatggtactatacatgtcgatagtgaagttgataaatatacaacgtttaagattactttttaacattcaaaactaattggtgcaaaatgttttttctaacaacatatatgttaccctattatatataaaacttatgagcagaaccaaagtaaaaaaaggttctgcttttttagtaataagtgcgctattggtactttaatttgtatataataagtgctattattgatttgtaagcgtttcaactattttgtggagggtgtaatatgagcaacgaaagtcaggtttccgaggcacctgtaaatttcggagcaaatcttggatatgttttagacttatatgacatatatctagacgatcctagtgcagttccagaagatttacaagtcctatttagtacaattaaaaacggtgaagcaaacatcgcaacaaacacagaaggtcaatcaaatgtgactaaaggagatagcacaatcaaacgtgttatgcgcctaatcgataacattcgtcaatatgggcatttattggcagatatttatcctgtaaaccgacctcaaagagaaaacgtaccgaaattaaacatggaagacttcaacttagatcaagaaacattagaatctatttcagcaggtattgtgtctgaacattttaaagacatatatgataatgcttatgaagcgattgtgcgtatggaaaaacgctacaaaggtcctatcgcctttgaatatactcacatcaataataatcgtgaacgtgtatggttaaaacgcagaattgaaactccatacaaagcaacattgaatgacaatcaaaaaattgaattatttaaaaatttagctcatgttgaaggttttgaaaagtatcttcataaaaacttcgtaggcgcaaaacgtttttctattgaaggtgtagatactttagtaccaatgcttcaacagacattaagaattgcgagcgatgaaggcatacaaaatattcaaataggtatggcacaccgtggtagattaaatgtattaacccacgtattagaaaagccttatgaaatgatgatttctgaatttatgcacatagattctatgaaattcttacctgaagacggtagcctacaattaacttcaggatggactggagacgttaaatatcatcttggtggtgttaaaactacgcaatcttacggtagtgaacaacgcatttcattagcaaataacccaagtcatttggaaatcgtcgcaccagtagtattaggtaagactcgtgcaaatcaagatacaacagataaaccaggtgcagttactactgaatttaaaaaatcaatgccgattttaatacatggtgatgctgcctacccaggtcaaggtattaactttgaagcaatgaatttaggtaatctagaaggttattcaacaggtggttcacttcacatcattactaataaccgcattggttttacgactgaacctgaagatggccgttcaacaacatattcttcagatgttgctaaaggttatgatgtgccaatcatgcatgtcaatgcagataacgttgaagctacaatcgaagcaatagaaattgcaatggcatttagaaaagaatttaacaaagacgtcgtgattgacttagtcggctatcgtcgttacggtcataatgaaatggacgaaccatccatcacaaacccactacaatatcatgaaatacgtaagcatgagtctgttgatatcctatacggtaaacaactcgtaaatgaaaacattatctctgaaaatcaaatgaatcaaatttttgatgatgttcaaaatacattacgtgcagctcatgacaaaatcgataaaaacgataaaatggataatccagatatgcaaaaaccagatagtctggcagaaccaatccaaactaaagatgaagaagtaagctatgaacaactcaaagaaatcaacgatgcaatgctatcgtacccatcagatttcaatgtactgaaaaaacttaacaaagtattagaaaaacgtagagaaccatttgaaagtgaagacggattagttgattgggctcaagcagaacaattagcatttgctacaataactcaaaatggtagacctatacgcttaactggccaagacagtgaacgtggtacatttagtcatcgtcatgctgtattacatgaccctgacacaggcgcacaatatgttccattacacaatgtgcctgaccaaaaagcaacgtttgaagtgcgtaattcaccattgtctgaagccgcagtagtgggctttgaatatggttataatattcaaaataaatcatgtatgacaatttgggaagcccaatatggtgacttttcaaatatggctcaaatgatttttgataatttcttatttagttctcgtgccaaatggggcgaacgttctgggctaacactattcttaccacattcatttgaaggacaaggtcctgaacactcatcagcacgtttagagagatttttacaacttgccggtgaaaataattcaacaattgttaatttatctagctctagtaactatttccatttattacgtgcacaagctgctaacttaggtacacaatctatgagacctttagttgtgatgtcgcctaagagtttattacgtaataaaacagttgcagatcctatcagcaaattcacttcaggtaaattcgaacctattttaccagaagcacataataaagcatctgttaaaaaagttattttagcttcaggaaaaatgtttattgatttaaaagagtatctgacaaaaaatccaaataagtcaattttacttgtagcagtagagagattgtatcctttccctgcagatgaaatcgatgcattgttaagcgagttacctaatttagaacatgtagcttgggtacaagaagaacctaaaaatcaaggggcttggtcattcgtatatccttatctaaaagagttaacaacagacaaatacgatttgagttatcatggtcgtatacaacgttcagcgccagctgaaggtgacggtgaaattcacaaactcgtacaaaatatgataatagaacaaagtacaaacattaactagggggaagttaagcatgccagaggtaaaagttccagaattagcagaatccataacagaaggtaccattgcagaatggttaaaacaagtcggtgatagcgttgataaaggcgaagctatcgttgaattagaaacggacaaagttaacgttgaagtcgtttcagaagaagctggtgtacttcaagaattattagcaaatgaaggcgatacggttgaagtaggccaagctattgcagttgtaggtgaaggcagtggtaataacacttcagaagcacctgcgaaacaagaagcacctaaacaagaaactgaaacatctacagacgacaaatcagcgcaaccagctgaagcaactagcaatgatacagatgataaatcacaagataataaccaacgcgttaatgcaacaccatctgcacgtaaatacgcacgcgaaaaaggtattgatttatctgaaatagctgcagcttcaaatgatgtagttagaaaagaacatgttgatcaaagccaaactcaaacaagcacccaacaacaagcacaaccggctgctaaagaagaaacgaaaaaactaacacaacaaaatccatcaaaacctgtaatcagagaaaaaatgtctcgtcgtaagaaaacagcagcgaaaaaattattagaagtttctaataacacagctatgttaactacatttaatgaaattgacatgacaaatgttatggatttacgtaaacgtaaaaaagaacaatttattaaagatcacgacggtactaaacttggtttcatgtcattcttcacaaaagctgcagttgctgcattgaagaaatatcctgaagtcaatgctgaaattgatggagacgatatgattactaaacaatattatgatattggagttgccgtatctacagaagatggtttacttgtacctttcgtcagagattgcgataagaaaaactttgctgaaatcgaagatgaaattggcaacttagcgaagaaagcacgcgacaaaaaacttggtttagacgacatggttaatggatcattcacgattaccaacggcggtatctttggttcaatgatgtctacaccaattatcaatggtagccaagctgcaattctaggtatgcactcaattattacgcgtccaattgctatcgatgcagatacaattgaaaatcgcccaatgatgtatattgcattaagctatgatcatagaattatcgatggtaaagaagcagtaggattcttaaaaacaatcaaagaattaattgaaaacccagaagatttactattagaatcttaatccacaacacaaaatagtttactaaccctaatacaacggcgtttaacgtcgttgtattttttatgtatttatgcatttttgaaatacacacggaatctttcctaaattatgagtcctttgatttactagcttgtattttgtgacaaaaaacaggcatattacaacagttatgaaataaaatcaaacactcagcaaaaaataaatcgcttacattataaaatgatataatatatttgatataaataattaagtagagaagatggaatgattttgaaaaaattattattcgcaactttggctacaagcgatcctttaagtgtttctattggtagtctcctacgtgctatggctagttcatccctagacataagtaaaggtgtttatataaatataaaatctgtaaaaattgccgctggtaattacgtgtttcaaggtactaattggggttatcaataaaaaagaaatgatttttaatcgtttaataaattaaatagcggcattataaacaagtcaatatgataatcgttaatcctaatagactgtttctatatactataaaacaaaggcatcgattccacattttagtggtgtcgatgcctttattgttaataatgtataaccatatttatacgaatcgttgtatcatggttattagcataattgtgaaacatattcgcattaaactttattgattcattttctttaatgataaattgctcatctgctaatataagcgtcaatgtgccatcaaatacggttatgtattccatagtgccagatccatgtggttcaccgctcatagtccctccaggctcaataagcaccatatagctttcgaattttttctcaatatcaaatttaaaatacggataaatttgatatttattatcttctgatgctaaaggttgaatatcattcaaagtgatctttctaatgatttcatcattttcttgagtaagctcagtaaatgaaacttttagaccattagctattttccaaagtgtcgtaatagatggtatagattctttacgttcaatttgtcctagcatcgttttacttacttcagtaagatacgataaatgttccagtgaatatccattttgttttctatagagttttaaattttcagcaataatatcattaatttctttcattctttaaacacctctatttacaatataacgcacataaagtatactttaaagtacaaacgttataacgcatttaaaaactttataacgtttttcacgatagggggggagtgcgttgttactactcaacatgctggtttatgctgttgtagcaagctttacaccaggtccaaacaatattatggccttgtttttctcgcaaaatttaacctttaaaaaagcatttcgtttttcattaggtgttggattgagttttttagctttactatgtttatccaacatttttaatgaatcactcaatacagtttttcctaaaattgaaatatacatgaaaatttttgcttttatttatcttttatatttagcttataaagtattaataagttcaatcggtggcccaaaaaaatcctttgatgaaaaatatagtaatataaaatatgcaatgatacttcaatttattaatccaaaaggtgtaatttatgcattaacagttatctcaacttttgtgacacttaattattccaattggatagtgcaattgaatttagtaattttattggcttttattggctttctaggtactttgagttgggctgctataggtacgctcttaaaagaatggattaccaaacatgaattactatttaatattattatgtcatgcctgttaatttatgtagcttttagcattgttctacattaatttacggaagctgagtagtgtaatgcatttactttcatcacatctccttaaattgttggtcttttatcatcatagctactgcttaattttgttcaataatcaccacaataaataccattctaattacaggcgactgataacctcatatgcttttatgcatcatgacgttaaatgttgctgataatattttcttggactacaaccataagatgttttaaatcttctgtagaaattagaataatcactgaaaccacactgtattgcaacttgttgtggactataaccattttttaacatacgttgtgcattttgaagtcgtttatttaataaatagcgataaggtgggtagccaactaaacgcgtaaaatgttggggtattttataacgactaactaaaaatttcttttcaatatcttctaacgaaatctgatctgcatagtgtaattctatatagtctaatacttgtcgaacaagttgtgcttctggatcatcattatgcgttgatgattcgttctctatgaaaattctatttaatagtataaaaaattgcgttaatattgcttcttctgccagtgattttccaaatttttgattatcttgttcattaattaatccctgtaataaataatataactctcttttttgtgactcatttaattgtagtaaatttttaaattgagatgattgtgtatcaaaacattgagttaaatccacagattcattagacagtctttctaataattgggaatcaaaacgcaaaccaatacgttccgcatgcccatccatttgttcgtttaattgatgaaattcataaggtgtaatgataagcattgagccaacgtctaatttgtattttctaccttcaattgtgtaaagcaagttcccagataatgaaaaaaaatatttcataatgatcatgataatgcagttcattcccaaaatggccatcgctgattttatgtcatgctgcatattcaccttcgtatggcaatgagattgaatcaaattgaaattttattgccttatctccaatcatttaagtcctcctctcaaaaaacaatcttttttcacgtttttacaatgttgctaattttcacataatttataataacattataacacttaaaggtatttaattatgaaaggatgaactaaattgactaaacctcaaattggtgtacaaatgatgatgcttaagcaaaaggttgaagaagaaggcatttatacagtcttataaaaattaagtgagcttggctacaatacagttgaagtatcacaaattgaaatgacagcgcataatatttctgaaatgcaacgcgcaattaaagattatgacatcaatattgcttccatgtcttgtggagtcgaagatatatcagaagatcaaaaatatccgggtgacactttgcagaatgatttcgataaaattgttgctgcctgtaaagctgtggattgtacaatattaagaattggcatgttacccatgaactatatgggatcaaaagaaagtactttaaattttgctaaaatctgtgatgaatatgcaacacgtttaaaagaagaaggcattgatttatattatcatgcacataatatagaatttgtacgttacgatggacaatttatgcttgatttaatgcgtgatcatacacaatacttaggttttgaattagatgtgcattggatttggcgtgcaggtctaaacccaattgaagttataccaaattacgcaaatagaattcgtgcaattcatttaaaagactatcgcgttggtgaaattgatatggctcaatatccaggtgagggtcaagaaaaactttattatatgctacatatgattacacagtttgctgagcttggcgaaggtactttacctttgaaagaaattatcgaagtaggtcgtgaaagtggcagtgagtatttcttcgttgaacaagacgagttatatggtgctgatccatacgattgcctaattaccagtcgagatcatttattagaattgggatataaaaactggttctaatcagggctatatattaataaaaatagaatcaatttatacattattttgaaagcgattacaagcttttgattaaagggggattcattcttatgttaaaaaatatcgcaatatccggattttctgatgaaatatcgtctgacttcgaaacacaattacaaaaagttaatgaattaggcatgaactatatttcattacgtggtattgatggcgaaaatatcggtaaatttacagttgataaaattcgaacaacggttttacccaaattaaaaaatggaatattggtgtatcatctataggttcgcctataggtaaaatttatattcaagatgatacagcttttcaagaacaactatccatattaaaaacaatgtgtgaaattgcaaatgaacttgaatgtaaatatataccaattttcagcttttatattccaaaagaggacaattttgatgattacgaatcagatgtcatttctaaattaaaacaatttgcaacaatagctgaacagtacaacattattttattgcacgaaaatgaaaaagacatctttggtgatattgcacgtcgttgtaaagtcatccttggtaaagtaggttcagctcattttaaagctatttttgattttgctaattttgtacaatgtggcgaagatacacaagcatgttatgatttcttatcaaatcatatcgagtacatacacataaaagacgctgtttatgaagatagtatcaatgtggtatgtggtactggtgatggtcaaatagcatctattctaaaacaagccatcgacggtggttatcaaggattcttaactttagaaccgcatcttgtcgtttttgatgcgatttaagatttagcattagaacattctacagagactattcaaaatactgcagcaaaagatggtgcggaaggttatcaaatgcaatacgaagcacttttagatattttaaaaaatattgaatataaggagaatgcataatgaataaagttcgtttaggtattataggattaggtgcacaaggtggaacatatgcaggttttatcaatgataataaaatagccaatttagaactcggcgcaatatgtgatattgatccagagaaaagaacagtcgctgcagaaaaatatcccaacgtacctttctacgacaattatattgatatgttagaaagtggggatgtggatgcaattgtaacaacagtgcctcattacttgcatacagaaattggaaaagaggcattatctcgagatattcatgcattactagaaaaacctggtgatatctatgcagaaaaagtaaaagaaataagtgatttagccgcttcaaagccaaatttaacatttggaatctttttcaaccaaagaacaaatccactttatcaaaaagtaaaatctttaattgataacggggaaattggtgaaattcgtcgtaccaattggattattacgacatggtggcgtccacaagcttattatgaccaaagttcatggagagcaacatggtcaagtgaaggtggcggtgtactagtaaaccaagcaccgcaccagatttatttattacaatggctatgtggtttacctaaaaaagtttacgctaatgtaaaatacggctatcaaagagatttaaatgtagatgatgatgtaacaaccgtattagattacggtaatggggcaacgggtgtattcatcacatgtacgcatgacattatcggtactgaccgtttagaaatcactggtgataaaggtaaaattttagtagaagatagcaaaaaaatcacattgaagagcttgaatcaatcagaaacacaaatgaaccaagacatgacttgggaagaagtggcagagcttttcaaaggcaatggtatgggcgatatttataaagaagaaacatttgaatttgaaagtgtgtggggccaacagcatataagtgttttagaaaactttacagcaaacatcttagacgggacacctttaatcgcaccaggtagtgatggtatcaatgtgtaaactttgtaaacgccatgtacttgtctagatggttaggcaaggaagtttcactaccagtggatccaaatgagtttgaaaatgcattacaagaaaaaatcaattcagagaaataatttgtcataacttataatcaatggagatggtcagatgcttaaagtagctgttgttggtcttggagatatttctcatgtccatatccacgcgatacaaaatagtactaaagcacaattagtcgctgtttgtgatgaaaatgaaaaattgagtcaacaagtaccacatgtaaattattataatgatttacaaaccatgatagattctgaaacgttggactgtgttcatatttgtttaccacattatttgcatgtttcggctacaacaacatgcgtagaaaatggaattaatgtgctacaggagaaaccattagcggtaaatgctaaagaaggactcgagctcgtaaaacttcaacgaaagtatccgaatattaaaattggtatatgtttccaaaatagatataatgctactttccaagcattacaagaaattgttgaaagtaaaacgtatggagaggtgattggtgtaaagggattagttacgtggtttagacctgaatcatactacacagacaaaccatggcgtggtcaaatggctactgcaggtggtggtgtgcttattaaccaatccattcatacattagatttaatgcaacttttatgtggaaaaattgcatcaatcaaaggcactgtttctcagttactggactacgatattgaagtggaagatactgcctctgcatatatcaagcttgaaaacaaagcaaatggtatgttctttgctacaaatgcgaatttcggaaattcaagtgttgaattacagattatctttgaaaatgaaaaatttacaatcaaagataatatacttactcgttttaatgaagcgggcgaaaagataaaaattggtgaagatgaaaaaatgaccggtaacaaaacgtattacgagccaagtcacggaaaattaattaatgccttttatgactgcatcaataatgatagtaataactacgttcatccaaaggatgcattaacttctatcgctatgattgatgccatacagaaatcatcagaatcacttaaaacagtacaattcgacagtatttaatacctcaaaattttctatggtagtatcgtccttacgtgacgatgctaccattttttattcatcgatgttggtttaatatatttaaaacgttgcaattaaatgtacacactttaattgatatttgaacagcacttccattacacttgatataatcttatcgaaatgaggctatttacatgaataacaactccaaaatcatattagatttagctgttactttagatggttttattgaaggaccaaatggagaaattgattggtgtatcatggagcctgagatgaatttcactgcatttttaaatcaaattgacgctatcatttatggtcgtaaaagctatgacttatggggattgtatacgcctgatgatgaacaagaaaacgatgaccaattgatgtggcaattaattcatagcaaaaataaatatgtatttaccaaccaaacacgttccaaccatgaccaaacacaatttattaaacctaaggacatgtatacaacagtgaatgacatcaaatcacaacaacaaaaagatatatggttgtatggtggttcggagctcattacgtcatttattaaacacgacctcatagatgaatatcggctatccatccatcccgttgtactagggacaggtaaaccactatttgaaaatatccataaacaacttaatctatcccacgtacaaacaaacacatttaaaagtggtgttgttcaattgatatatagtaaagattaatataaaaaggaatgataagtttgaatgtagcagtcaatgcgaaaaatgtttccttaaagcttaataataaatatattgtttctaatatttcttttgaaataccaaaaggttccattacgttaatcaagggcgacaatggtataggaaaaagtgttacattaaaattaatagcacaattaatacgaccaacaaaaggtaagattcagactaacggtcgtattgcctatgcgcctgataaatttccaaataatttaaaaataaaagtccatacatttttagaaacgatacaaaacttaaataataactatgaccataattggaaatattatagtaaatcatttaatttatcttcatttgaaaaagataaattaaaccaaatttcaaaagggacattgcaaaaaataaatatcatacaagcattgttatcaaatggagaaatacttatttttgatgaaccatttaatggcttggataaaaaaacagagagtaactttatttctttattaaaaaaactgtcaaaaacaaaaacaattattttgacttctcatgaaagcaatatcgttcaatcatttgcaacacatgaattaaatttgcataacggcaaatttaagacaataaatacaaaccctaaatttaaagctattacatttttgacttctaaaaatgcatctatcagttttcctcaagtattagctcagaaaatacataatcaaattaatattaataataattcaataaaaatatacatagatagaaatgatacaaatattattttgaataacttaatcaagcataattataaaatactagaagtgaaggacgagtagtatgttactaacatttttaaaatatgaaaatattaaatttattaaatcatttcaattcattgcacctatatttttatatttaatctgggtcgttggtatttatatatacacggacattcctattttatctagttatggatcgacttcagtaggcctatatatcatttcaacttggctgactataactaatttcaaaactgattctattaatgaacggtatgtattttatattcaattatcttcaaaactcaagtatttaatttttaaaatgacttacatatttcttatagtatttacgctaaacatcatatctctattttatccaatattacttggtaattttgataaatcaatgacactcaatttatttttcataggattaatcatccacatacttatgggaggttttggtattttgttaggtacttacataacaaatacaaatattatttttaaaccttactggtggctgattactgtatttttcattattgtgtcattaatcaaaataataatagttaataaccttccttttacaaaatggatattatggatactaccaccgatcaataatttattatcttatttaacagaggattcaatacaaatatatgaccttaactttcttgtactagtgttaatttcatttgcttaccaatttattgctttttgccccttaatatatttatataaaaagaaatactagaatgaaaatagcccatcgctcacttaaacaagtaatcgatgggctattttcatgcttaatcattttcataaagttaaaccttaatttaacaatatgaaattaaagtatttacgctatataaacaaataattctataatggcaataattaaaaagatcaagaatactatgccatatatattattcttcttaacacttttagcattggcatttttttgtttcgctttactatttaaattagaaaagaaagtgatgccagaataaacagcaataagtaccgttattgcaaaaacaatccatacactagtcatatttctacctcctatatatcatattccatctattttttaatctttcattaaaaattttaaatacgttatatatctatattaatacatattttaaaaacgtccaatgtataatcttaaaaattcataaaacgttctttactaacaaacatcatcatattaatcacattaaaaatacgttataataaattgaaaagtgataaataaaggggttaatataatgaatggtctaagaagtgtaacaaccgggacagataatttagaaaaaactaaaactttatttaaagacatacttggattaaatgttgctgataaaggcaatgctttacgttttggagacgctgaactcaattctgggacacgtattcattttgtagaaattccaaaatatcaaaatgatgataatcatattgaaaatattggtttgagaattccaagtgatgaaggtctagatgagtataaaactatattagatcagcatcatattgagcatagtgaagtaacagatttgaatggacataagtattttgaatttcaagatcaaaataatcagtcttttaatatttattcaaatgaacataatataggtgcgcctttaggtatgcctacatttgatagcactgtcaacccactacatcaaattcaagggttaggtcctgttttacttaaggtcaatgaattattattaactcaatctattttagataaagtattcggtttaacacactttgctgaatatgcaccacatccagatgcggattataaagtacaagtatttcgtataggaaaaggtggtttaggtggagaattgcatttatatgcttcctccgaagagattaaaatgcctgaacatggtatccttgaacaaattgaattcgctacagagtctaaggcacagttccagaatgcattacaacaactagaatctataggcattccttatcaatcattagatcaagatggcgaaaaatctcttagaattagtgaaaaaagtggtatcactttcatattaacattagaaatcaaagaataagcgaggtatatattatgttacatgaaacatggaaaaataatacacctataaagaaagtagaagtcgtacatacagatgcacaaaaatttactgtttctgatatgttaacaattgataagcagtatgatgttatcaatgaaactgaagaatattatcaaattgtagataactctggacttgtcggtggttattataaagattattttaaagaagtttaaactgagcactgtatgcagaacactgtttgcgtatttataatatttttctaataagactggggcaaacgaacgattaacgattcatgccccagtctatttttagtgattgaaaaactaattattttatccattttaaaaggagattataaagtgatggcaaataccaattatattaatagagatgaaactgtattcaatgatgcgcaatcattaatgcaacttaataaaaatatattactaaaaggaccgactggatcaggaaaaacaaaattagctgaaacattaagtgagacaatgaatagacctatgcaccaaattaattgttccgttgatttagatgcagaaagtcttctcgggtttaaaacaatacaaacaaacgaaaatgggtcacaagaaatagtatttattgatgggcccgtcataaaagctatgaaggaaggtcatattctttatatagatgaaattaatatggccaaacccgaaacgttacctatattaaatggtgtattagattatcgtagaaaattaactaatccatttacaggtgaagtcgttaatgcagcacctggatttaatgtaatcgcagctatcaacgtaggttatattggtacattaccaatgaatgaagcattaaaaaaccgtttcgttgttattcaagtagattatattgatggagatattttgagtgatgtaatcaaacaacaaagccaactcagtgatgacataatgattcaaaaaatcattaaattcaatgaagatttgcgtacaatgacaaaacaaggtcaaatttctgaagaagcggcaagtataagagcattaatagatctaagtgatttagctacgattatgcctatcgaacgtgcaatacaacgtacaattatagacaaactagaagatgaacgtgagcaacaagctattttaaatgcagtagaattaaatttttagtgagggataatcatgagtgatcgttttataaaatttaatgatgaacaattagacgctaagcaagtcatgatgcttcaagatttagcccgacttttattaaaaaatgatcaaacacaagtaaaaatacaaaaatttccatattatgatccaataaacaataccctaattacaagttcattttggtcacatagagatatagcaatagaaactacaggattgaagaccgatgtcatgcttgctgcttatggttatcaaatgatggatgaacaaatcgttaatgaagtgattcataatacaacatttcaacatccaaaatttttccagcaactattcaaattacttgaagatcaacgtattttaaatgccattgcaagacaacgtccatcgattcaacccgctattcaaatgcgtaaagaggtacggttaaattatacgaaaacacaaattaaagtatataaaactaaaaccactttcactgacttactatttttacatttagaagcatcttttataactgaaaatttttatgatattcctcaaatccatccacatattgacgatattttaaacaatatgtatatgtatttgcataattttttctataatcaatcgtctgaagacaatatgtatttagcagaaagaatcatgtatcaaattgatgacatattaaaagaagatatgttaaatgagtattatcacttacctaaaaaagtatacgaagcgattgaggcactcaaattcgaagacttaacaagaactgatgccagtaattcagatggcaaatcagaagagcaaagtgatgacaatacagttagtgaagacatggaatctaaccatcaagatagtgcttctcaaggtggtgcctatttagaaatggaattacatgaaggtgaaaatagtgaagtcatgggggacaatgataacgcacgtgaaggtgatgcaagcgatgacatgactgacatgcaaaccaaaaaagggaacggcctaaccaataatcaaatcgatgacgatgagggcggttcagtcggacataatcaagcttttgcattaaaaggcatcaatgagcgagttgaaattaaatggaatataccagatattgaaccacaatatgtacaagcatacaaaaacgttgaatcagatgttcaatttgaaataaaaggtttaatacaaatcatccagaagaccatagacagagaacatgttgatgagcgacataatttaactaaaggcagactgcaaaagaatttattaaattggttcattgatgaccaatacaaattattctataaaaaacaagacttaagtcaatctttcgatgctactttcacgctacttattgatgcttcagcaagtatgcaagataaaatggaagaaacaatcaaaggggtagtcctttttcatgaaaccttaaaatctttaaatgtcaaacacgagattctagcctttaatgaagatgcctttgatgctgacgatgctaaccaaccaaatattattgatgaaatcatttcttatgatcattcaacattagaaaaagatggcccaagaattatggcgcttgaaccccaagatgataatagggacggtgtcgctattagagttggaagtgagcgtctaatgcgtcgctcacataatcaaagatttttaattgtattttcagatggtgaaccgtctgcctataattatagtcaagatggtatcttagatacttatgaagctgttgagatgtctcgtaaaatgggtatcgaagtgtttaatgtcttccttagtcaagaacctattacagaagacattgaacaaacaatccataatatctatggtcaatatgctttatttgttgaaggtgttgaaaatttacctgcacaattgtcaccattattaaaaaaactgttgttaaagtctttttaataaaacaaatagttataaatggcttttatatttttaaatattctgaaatttatatagacgttatctaaacaaacatgatagaatggataatattattttattggttagaaggagaacgacatatgaataaaaatacatggattataggtttcacactatttgcaatgttctttggtgcagggaacctcatttttccaccaaacttaggcttagaaagtgggcaatatttctggccatccatactcgcatttgcattaacaggtattggattacctctgttaggtgttattgtaggtgcattggataaacaaggttacattggttcattaaataaaatttcacctaaattttcaatcatattcttaattattatatatcttacaatcggaccactatttgcaattccacgtactgcatctacttcattcgaaatgacagttacgccaatagcaaatacgaatagtaatttagcactatttattttcacagttatttatttcttaattgttttatatttatgtattaatcctagcagaatggttgatcgaattggatcattattaacacccttactattgatcactatcttagcaatgattgttaaaggattcgttgattacggtagtaattcacatagccaagcaactgatgctttcacatcaaacttcagtggtttttcacaaggatttacgaacggatatttaacaatggatgcgattgctgcgattgctttttcaatgattgttgtaaatgcagtaaaagcaacgggcgtcacacatgcaaataaaatattcaaacaaacattgatggctggtattattgctgccgtagcacttatgtttatttacatatcattaggctacatcggcaatcatatggcagtttctcaagaaaaaatcgcgagtttgactgcaaatgatcaaaatatcggtacctatttattaactacaatggcaagtgttggatttggaacttttggtaaatatttgttaggcattattgttgctcttgcttgtttaactacagcttgtggtttagtcgtagcagtatcagagtatttccatagaatttccccaagaatttcatacaaaatttacgtaattattttcacattaattagttttatcttagctaatcaaggcttaaactctgtcattacaatgtctgtacctgtattgagtattgtttatcctattgcgattacatccgtactacttattttattagctcgttttgtaccaacaaaacccattgcacaacaaataccagtcgctatcgtttctattgtatcaatactcagtgtgatccatacacaaggttggataaaattaagcttcattgatagtttaccgttaaaatcatattcattagaatggttcccaatcgcgattgtaactacaattattggatatattgtagcggcaatggttaaaaaacaaaaaccgattgtgtatgaaaaagaataactataatcatctctaaaacaaaatataaattttcaaagaagattccaattatttttggaatcttcttttactattataaagctgtttttaaatatttttataattatagaatcaaattattttaaatgcccaattgattacttttcaaaagtaagctatactctttacttcaagtgtttcgtcataattaaactttttaacattttggtctaaagcaatgtaaatcgtttgaaaaagaaaacacgtaacatagaggagtcgaataatattaaatattctcaatggaaagaaaaactagattggccagtatttttaataagcgggggcatacttgtcttatttgtactgatgtcatcaatattcactaagacaacatcaacattagttcaaaaaggatttcagctttcaattacatattttggtgctttttggcaagttttactgctagctacttttgctgttggagcatttttagctttttccaaatacggacgtgtaagattaggtaatgcctctaaacctgaaatgggttatttcagatgggctgctattgtaataacatctggtttaggagctggtgcgattttttgggcagcagcggaaccaatgtattattttatagatgtaccgccaacaatggatccaaatattaaaaatagcagtactcaagccattccggctgccatggcacaaagctttacatcctggggattcacagcatgggcagtttatggtgcagtcagtggcattattattatgtatgcacactacaataaaaatatgaaaatgcgtccacgtacgctgttgtatccaatctttggaagtaaaattgaaaagaataaaattggatggatgatcgatgtattttgtattttaggtgcagttgcaggtacaattggcacaatcggcttctttggtttccaatttagttattggttacatagtatatttggtatcccagataatattatcacccaaattttatctgtagttggtttaatggtcgttgttacaatttctgccacgacaggtattgataaagggatacagtttttaagtaaacttaatgtatggcttgctttagcacttgccgtatttattttattaatagggcctggccgttttattattgatacattcatttcttcttacggcgtatatcttactcactttttagaaattagtacattcagaggagatgacaaatgggctggagcatggatgttattctttttcggctggtttattggttacgggccattaatgggcatgttagttgcacgtgtttcaaaagggcgtacaatcagagagatattcttactcgtttctatagtagctgctgttgtgtcgcacttatggttctccatacttggtggtagtggcctcttttacgaaactaaagatagtggggcgattagtaacccattagctgataatggactgccagcagcagttatatcaatcgcatcacatctaccattaggtactgcactggtcattgtattattattactaactttaattttcgtaatcacaactgcggatacgatgtcattctcaatatctatgtcagtaactggagagggagatccacctaaaatgattaggctcttctgggtagttattatgggtgttatttcaattatcttgataaatattggtgagggtagtattaacgctattcaatcatttatcatcatcaccgccgttcctatatcaatcattatgttaccggctatatggacagcaccaaaaattgctcataaattagctgttgaacaaaaaatcactactgaaaataaacaagatcatactaaagataacattttagaagaaagatcttcagataataagcactaaaaaacacggaattacttatcacagtaattccgtgtttttatatacttaattatttattttctttcatatctaacaattgattttgtaattctgtttcaagttcatttaattctgattcagcctgtttacgtttcgtacggccatgttcttgaatttgtaacgtttgttcaatcgtttcaatgatatctttttgcgttgttttcaatgtttcaatatccacaactccgcgctcattttcagtagtagttgctagagcattttgtttcaacagctcggaattttttagtaataaatcatttgtagtatccgtaactgctttttgagcagaaaccgcattacgttgtctcattaatgtcagtgcgatagacatttgattcttccataatggaatactcgttaatattgaactttgaattttttctgcaagtgcttgattcacattttgtatcattcgtatttgtggggcagtttgtatagcaatttgtcttgatagttgtaaatcataaatacgcttatctaaacgatcaacaaattgttccatatcagaagcagcttgcacatccatttgatttcccgtagatttcgcttgttctctcaatttagggatttcatcttgttgcaaaacgtattgcttgtgtttagcagcttctatatatattgataactcatcaaaatagtctttattcatatcatacaattcatccaacatatctatatctttttttaaattgtttttatgtttatctagttcaattgagatacgatcaatttgtgaaccgacagattgcatttttgaaaatatctcattaactgatgcctttgttcgtttaaaaatacgcttcaacttggattggttttccggatttaattcttctggattgaccgattttaatttactcattaatccgtttaatgagtcacctacaggtcccacatctgtagttttgacttcatttaaaattcggtgtgagaattgtgacatatttgattgcgcttccgtaccataatttaacaaaccatcattatccattggtttaatttgtttactcaatttatcaattttttgttgatcttcatgagaaaactgacttgaactttttataatttcagactcatttgctgaattttcatcaatatacttatccaatggatgcgaattaatcgagtcttgctctctagccataaaattccactccattctgcctttaattgtctatttatttgttgcgtttctgctcaattttattcaattccatttcaatatctagctggctataatcttcgtcattaatccttcttaaatcagcaaccaaagttcgtttcacttcatctaatgtgatgcgcgtttgttctaatttttgtttttcttctttagattttttaggtgatttagataatctcgtataagcttcaattaaatttaaagcattatctatatgagagtaaaagaaactctccaccttgaaaaatgaccctggtcgctgtttaacagcaaaatatattgcacgggatatacgatatatctcgttgacttgtttaaaatctttaatcgatctaacattcacaaatgttttaaatattcttctaattttatcctgagcattatttaattgaccatttacaaaatgataatctcgacgagacaaaccaatttctcttagatactttctagaagttaaacgttgggtaggaaagtaaaatacaataaatgttgcagcagctactaatacatcgaaaataaaatatatatctaatgcaaagatactagcaaaccaagcaataactgctgctggtaaagcaataattgtcccaaaaatacgagaaatattatatctcaaaattcatcttcctttatatcgttctaaattttttcaatgattgatcataatctaatgcttctattgtgtaatcttcaacatgtgatgctggagaggcaccttctgtaacagcgttaataaattcagttaaggatggctcatccccttgagcataaatatcaacataattatcaatattttcaacagtaccaactatattgtgtttttgtgctattttttctgtataataacgaaaacctacgccttgtaccattccaaatactttaatatgtttacgttgcataaaatcacctcttaataacattatacgaaatttcactctacaaaactaatatttacgtttataatccagttgtatataggccaaaagtatgagacagataacttgattttgtcgcttaactcgttagaatattacacataggcaaaaattgtacgtctctgaatttaaataatgaatcctatatttagttttattcatattctatttataaacatggggatttttatttagagtgaatgtatcatacaacatacatatgtatatccaatttgcactataagtctaaaaggtatgcattataataccaaaaattcattttagactaattgtgaaagggtgaaataaaatgtggacagttgcaaaaattcgagctgattatgaaggctggtggttatttagtgactggactgatcaaatcgtggaacagcacaatttcgagacttatgatgcaatgatggcttttattaatgctttaatttaaaaagtaaacgccactatgatattaattagtcggcaaatacaatatacatgcatttataataatgtgaattaggattttgtgaagattgtgatgaagatttacaaatattctatagtaatattgttttaaataataatgaagtttattataatttacctaacattgaataaacagtttattcatattagtcttgcaatntactaaaaaatgctttataattttagtcaagcaattgttttattccatattgcaaagaatattgtacgagtaattttttataatactgtgtcattgtattttttgtaatatgcgaataacgcatattgaatgaatattagtcttggaggtttcacatttatgaaacaaggtacagtaaaatggtttaacgctgaaaaaggttttggttttatcgaagttgaaggagaaaacgacgtattcgtacacttctcagcaattaaccaagaaggttataaatcattagaagaaggtcaatcagttgaatttgaagtagttgaaggcgaccgcggtcctcaagctgcaaacgttgtaaaactataatatagatgcaatattgacttatctaaagaaccttgttaaaggttctttttttatagagccccttatctctttatgagattaggggctcttaatgcatgcgaaaccgcatgtataccattatacccttatctctttatgagattaggggcgcttaatacatgcgaaaccgtatgtataccactatatactttatctaatatcttaatgcatgtatctacactataggacaataaaaggtgactgagctccttttcagagacacagccacctttggattatttagtatcattgataattaattgacgtaatgattgacgtttaataacttctcttgctttaccatcttttaagaaaaacacagacggtttctgcatttgattataattagatgccatagaataatggtatgcaccagttgaaagtatcgctagataatcgccacgcttcactgtgcttggtaattgggcatcttttatgataatatcgccagattcacataacttaccagcgattgttactgtttcgtctttaggatcatttctattaactaataaggcctcgtattttgcatcataaagcgctgttctaatatgatcgctcataccgccatcaatggaaacatacttattgacctgaggaatttccttgattgttccaacttcatataaagtaatacctgcttcaccgacaattgaacgacctggttcgataccaatctctggtaccggataatctgcatcttcggcaattgatttaatagcagcagtaatctctgcgataccttcttcgatagggaaacttacatcaccctcaacatatttaatgctaaagccaccgcctaagttaattaaatcaactttgatatcatttgctttcaaccaattaatcacaatattagcagtttcaatcatagcctctgtgccttcaatttgagatccaacatggaaatgaacacctttgaggtttaatttttgagtatctcgcactttttcaataccttgaatagctaagccgtgcttaattgataagccaaatttactatcttcttggcctgtttgtataaattcatgcgtatgggcttcaacgccaggattcaatcttaaaacaacatcaatttcttcacttgcatatcgctcaatcagatcgatttcctctaatgaatcaataacaatgtaaccaactttgctttctaaagcatattgaatttcatgttttgttttgttgttaccgtgaaaatgaatatgttttggatcgaaaccagcttctaatgctgtatataattctccttcagacactacatctaattcaagtccttcttcttgtactaatttaaccatttgtaaacatgtgaatgcttttgatgcatatgaaatattgtatgctaatccactttgtttgaacgcttcatgataacgtctcatttggtttctaatttgtacttcatcatatacaaaagtaggggtcccaaaactttgcgctatcgtttttagacttgtgcctcccattgtaagttcgccattgctattatattctactaccataatttatctatactcctttattaatgagtcatgattcattgcacttaattgttctgaattagcgccaacgcctttaaaagtaaattcatcgacacgtatatggttattatatagtatcacttcatcttgtgcattgacactgtcatcaacttctacaaacatatgactcatcataagcgcacgaatagggtagcgcttatgatttatcaaagcctcatgttgtgctcttgctttgagtataccatcaccataaccaacatcaacgactgccaattttgtgttattttttgtcgcttcaaaagcaaaactgtaaccacaaaattctcccgcattgacttcacgcacttgtatgacattacctttaactgttagcgattgctgtatgtccgattcattgattgtactatagggtctagaaccatacaatgcaataccaatacgcgcatgcgtatggttaggtaatacaccttgctcacgatagtagcttgcactattctgtgcatgtatcatctcaaattcatatccttcatcaagtagcgtatctacaatctctaaccacgcggcgcgctctatattataatctggaacatcaaattcatctgcgtatccaaaatgcgtccacaaaccactaatgtgcattttatgttcatttttattctgattatgatggtgaatgacttctttaatttcatcaagtgtctttaaacctgaacgatgtaataaattttcatattccaagtgaacttgtatgtcatataagtcgttaatattttcataataaaaagaaagggaaggcaaagtcatttgaatctgattctcacgtatcttatcaaattcataaactgcattcatcaaaaatatagtagcatttggcgctaatttgcgaattcgaattgcttctttaagtgatgtggtactaaatgtatttatccctatatctaaaaactgttctactgcaaattcaagtccataatggtacgcattattttttactactgccattatttggttatcttgtttaacatttttagcgttttctttaaataattgtcggtttactgaccatgtggctgtcattgcgattgcacctcactataagatttgagtatttgttcatagtaatctgcaatacgtattaatatagattcattaaagtttaaatgagaagtgtgtaaaccagtcacgtatccttttggttcatctcgaactccaacaaatacaaaatagcttggtgcaatttgactatagaaactaaagtcttcaccaaataagtaaggcgtaggtttatcaatcacttcaaactcagcatttactaatccattttcaacatgtttgcgtaattgaggatcattaaaagtaggagggtaaccttcttcaaatttcacttcacactcgacattaaataataatttaacgctttcgctaattttcgtcatttgctgttttacaatctctaaatctttcacatcatatgttctaatagtaccttctaaatagccgttacttggaaccgtatttatggcttcaccagcttcaaaatgtcccatatggacaatgtttcgtttcaatccatttaaatgatattgctgtatctgtcctacttgagtcaatacatgttgtaatgcctcaccgcatgaatgcccttgctctttatcagcaacatgacttgaaagaccatgcaaatagaatctatactctgtagcacttgctgtaatttcttcatctctaatcacaacacggccttcattttcaaatggcatgacatgtataccaaaaactgcttcaataggatatttttcaaatgcaccagcacgtattaaacgattcgcgccacctccagtttcttctgcaggttgaaatatgaagacgatattttgaggaagttcgcccttatcagctaaatttttacatcgtttaacaaatagcataagggcagttgtatggccatcatgtccacaagcatgcataacatgatctacttcacttcggtaggatacgttattttcttcgtaaatcggtaatgcatctatatcagcacgatatgcaatcgtatgtgtactatttccagataaataggcgataacgcctgtatctaagggacgttcatatggcacacctaaatcatctaaaaaatgcgcaatatactttgttgtttcatattcatgtaaacttaattctggatgcttatgtaaataacgtctatgttctgttacaaattccaactcagtcatcgatatcaaatcctttaaattattatattaattacactaaataagcataattgctagtttgctatgtattatgtataaagtttgttttgaatttataaaaataggaggatagacaaacttatcgaaacaaagcgtagtttaacacttagcaatagataaggggagacatcatagtaaaatagatattgtctcgtctaaacctcctatattcaacaaaataattccgtatcattttgtgtaaaatacatacggtaatatataacttgtataagtttatatacttagtactctagtcgtttaattttcttagtgccgaaacgatttcacgttttgaatcttcgacttcagttgtttgtttaatcacttttgctggcgtaccagctacaactgcgcctgcgggtacatcttgagtaacaatggcaccagcagcgacaatggcaccggcaccgacacacacaccttcaagaatgactgcattagcaccaataagtacgtcatcttcaataacaacaggtgaagcacttggtggttcgataacaccagctaaaactgaaccagcaccgacatgtacatttttacctgttgtagcacgtccgcctaatgtagcattcatatcaaccattgtgccttctccaacaacagcaccgatattaattgttgcgcccatcatgattacagcaccatcttcaataatggcttgttcacgaataaatgcaccaggttcaatacgtgcattcgtatttgttaaatctttcaatggaatagctgagttgcgtcgatccatttcaacttcaatttcatcaataactgattgattagactcataaaatggtttccaatcatctgcttcacaaaaaataactttggaatcagatgaaccaaatactttaaaatcacttgggaaagtaatgttttcaaaatcaccattgatgtagacttttaatggtgtagatttttttgcatcacttatatattgaataatttcttctgccgttaaatgttgtaccataattaaattcgctccttagggtttataagttatcaaatgtataataaccatttttattttgaactagtttttctgctgcgccaatcgcaccgttggcaaatatatctttagattgtgcgcggtgtgtaatttcaattgtttcatccgtacctgcaaaaaccacatcatgttctccaacaatcgtgccgccacgaatagaatgaatacctatttcatcttgggtacgtttttcagtcgtttcatgtctatcatatacaggcgttgtagtctcacgtaaagactcaataacatcatataatttcactaatgtaccactcggtgcatcaacttttttattatgatgtgcttctgtaagttcaatatcaaaatcttgcaagagcggtacagctgcttctaagatttttgtaagtgcatgtacaccataactcatattcgcactgaaaaacactggcatatctgtactcaacgcttttaatttatctatgatttgttctttctcacccgttgtagcaatgacaactggtaaattaaagtcttcttctaataatggtaagagtagttcaggatttgaaaagtcaatagcaacatccgcttctgtagcctctgaaatatgttcaaaagtagggtagggatagtgcttttcactgtttctcacaataaccccaacgatttcgtgatttttctcttctgctaaccttgctacgcgttgattcatagcaccatatccaattaataaaatcttcatgaatttccacctactttaaattgttcgtaagcttgttctaatttttggcgatcactgtcttcaagtgtaacaagtggtaagcgtacttcatagttaccaaatccttcaactgctgttaatgcttttacaggaatagggttaacatctactgctaacgcatctaataacgtttgaataggctggaattgagactgtatgttttcgtcattttgttttgcatcatataaagattggaaagcatttggaataacattggcaaccaccgagataacaccgtgaccaccttgattgaaataatcaacaatattatcgtcgttgccactatataaagcaaactcatctaaattaaggcgttgttttaagtcttctaagtaatcaaaatcatttgtcgcatcttttaatgcaacgatatactcattttcacttaaagtttccactgtttctgcatcgattgtcatattagtacgtgacggtacattatataatacaaccggcaatttcactgcatctgcaattgttgtaaagtgggcaattaaacctctttgatttgtcttgttatagtatggtgtaataagcataatcgcatcagcaccaatttctcttgcacgcacagaagcttgaatagacttttgagtattattcgtaccagtacctgcaatgacaggcacacgaccatccacaacattgacaacgacttctaaaatttgatccttctcttcatcagttaatgttggattctcagctgtagttccattgactacgattgattttgcattattatctagtaaatatttcacatgtcttctcaatgcatcaaagtcaacttcattgtgtgtaaatggcgttgctagtgcaacacctacaccttcaaatatatgtcccatattattttactcctttcaagctcataacttgttcaagtatttgtactgcatttaatgctgcaccttttaataagttgtcagaagtacaccatacatggaaagtattgtctaagctatcgtcacgacgaatgcgtccaacaaagatttcatctctaccagttgaatgaattgctaatggatattcattgttttgaggattatctacaagtacaacacgatcatctttttcaaataactcttgaatggctgaaactgttgcttctttttctaatgttacactcatgtgtacactatgactgtcttgtacaggtacacggacgcaagtagctgttacttttaaatgatcatcttgtaaaattttacgtgtttcatcaatcattttttgttcttcttttgtatacccatcttcgagaaaagtatctatatgtggtaacacattattataaatagagtgagggtatgcctctggcgctttaccatttgctccttcagctaaatcttgtttacctttcactcctgaaccagatactgcttgataagttgtatatgcaacacgttttaatccaaatgcttcttgtaatggtttaagtggcacgacagattgaatcgtagaacagtttggattggcaatgatttttctatctaatttaggttcattcacttctggtactattaaatcaataccttcagtcattctccattgactagagttgtcaatcacgatagctcctgcttgttcgaaaataggagaataatgttcacttgtactaccacccgcactcattaatacataatcaaaaggttcactagctgcttcatcagtcaattcacgtactgtgtatgttttaccttgaaattcaatttgttctcccgctgatcgcgctgaagagaataatactaattcatcaaagacaatgccttttctatctactgtttctaacatttttcttcctactaatcctgttgcacctgcaatagctaatctagtcatatacaaaacactccattttttattagttgattttaaaaagttttgaaaattcagatatcaaaagcttgatataaagtctgtacagcacgttcaccgttttcagcatcgatgacacatgaaatactaatttccgatgttgtcgtttgataaaatgagatatcattttcaattaaagtaataaatgcttttgaagctacaccagacatatctctcatacctgaacctattaaagaaattttaacgtattcttcattaattctgaagtccaaggcactaaagtcttcttttaaagtttccagtatagatgaaatttgtgcaacatccgtatctttaattgtaaaagacatttgtaagccttctaaattaacaatttgagatatcatatctacatttacagaaccatcttctaattgactgaataattttgtgagtaatttattatctggtaaggggtaactaattgtaacatgcatcatatgtgtatctaatgcaacgcctgtgacggctttcttttctaaaatttctgtttgtggcataatccatgttcctttcacatttgataaagttctacctaaatataggggaatgttataattatttgctaattcaacacttcttgtttctaatacgcctgcacctaaagcactcatttccatcatttcttcatacgatacataatcgagtcgcttcgcatctttatataggcgaggatctgtagcataaacaccatccacatctgtataaatttcacaaggcgtatgattactcgcagctaatgcaacagcagtcgtatcagaacctccacgtcctaaagtcgttacttctaaatcatcattaataccttggaaaccagccacaacaagcacgtcattttcttcaaatgcttgttcaaatgtttcaggattaatttcagctatacgacttttcaaatggtgcccaaccgttttgataccagcttgataacctgtcatagctttagctcgaacgccaatgtcattcaaaaccatcgataagtatgaaacggtttgttgttcaccagttgtgagtaatagcgctaattcttgatcctttggactagtggttaatgtagatacatttgccattaactcatcggtcgttttacccatagcacttactacgacaataagttgttctccttgtgcaattctcaaacttaacatctcagctatatttttaattttagtaaaatcactaactgaagaaccaccaaatttcaaaacacttctttccaaattcatatcctcctcgttgaataggggagaatcacagttatataaaaaaagaacaagtcgaaaatgcgaacctgttctatattatatatacaagtgatgcactccattatcttaaaataatgacagactcttagctcttaaccataaagtccaacatgttataagctgctattataaccgtttcggcatctcaccctttcaaaattagctgctagcagtcagattcttctaatctttactaatgattgatgcgcctcatcaaaaccttattaaattttgtttatgttttacattatacataggcttacatgtactgtaaaccgcttttctttaattttttaaatttactgaaaaatatgacatttaaggagtgttttttacctcaagagtgtaaaatgatatcttttcgaggtattgcttttttaaaacacaaaatgatgattcttttaaaattcctcgtacgatgccggatcttgaccttttagtcggccatcttgctgtgtcagactattaattttatcaatatcttgttgttctaaagtaaaatcaaatatatctttattttgaatttgtcgcgcaatcgatgttgatttaggaatagggacaacaccattttgtacatgccattttaaaatgatttgagggattgttttattatatttttctgctataacagcaacatctttatccttaatcacctcagatgcacgacctaaaggactccaggcttgtgtaatgatgcctttttgattatgatattcaatcatgtcctgctgattaaaataggggtgcagttcaatttgatttactacaggcaacacgcctgtttctttttctaaagtttcaatatgttctggtaagaaattacaaacaccaatagattttatcaagccagctttttgtgcatctatcattgcttgccatgcttctacatacttgccttgtttaggattaggccagtggattaagtataaatctaaatactcaacacctagacggtagattgattcttggattgcaaccatagctgcatcataatcttgataacgacctggtaattttgaagtaatgataacttgatctcttgtcacatgactattgtcaatcgctttgcccacagtaccttcgttttcataattatatgctgtatctaacaagcgatatccttgatttaatgcattcgttattgcgtgtgcaccatgcgcaccattaagcttatatgtaccaaatccaatttgaggtaatacttgaccgtcaatcatatttaaatttttcatttaaacattcctcctacagttaattaattatgattatataattgtgaaaatgctttttaaagcaatcggcctatacctctttttaaagtaggggaatgaaaaaacgtgacacaagtctattttcaaaaatgtgatgtcataactacaataattaggtgatgatatgaaaaaagcgtctaaaacatttatgtcttagacgcttaaatatgattacaattatttagctaatacaccagtttcttctaaataggcttcataagaaatctcttttgaaactgcaccagcaggatttaaatcaataacacggttcgcgattgtgttaataaattcaaaatcatatgacgtaaagatgattgaacctttgaagttctttaatccatcatttaccgcagtaatactttctaaatctaaatggtttgtcggttcgtctaacaatagcacgtttgcacttgatagcatcattttacttagcatacaacgtactttttctccacctgaaagcacacttgcttttttcttaacttcttcaccactaaatagcatacgtcctaagaagccacgtaagaatgtttcagtttgttcgtcttccggtgcatactgacgtaaccaatctactagattcatgtctacaccttcaaagtagtcagagttatctttagggaagtaactacgtgaagttgtgacaccccatcttactgaaccttcatctggttccatctcaccagctaagattttcaataatgttgatttagcaaattcactatctccaattaatacagctttatcattaggatccattgtaaatgaaatattgtctagaactttaacaccatcaattgtttttgaaaggttttctacaaacaataagtcattcccaatttcacgttctggagtgaatttaacaaatgggtaacgacgcgatgaaggttgaatatcat

SEQ ID NO: 54 - DNA, 805 bp, Staphylococcus saprophyticus
  misc_feature (805)..(805): n is a, c, g, or t
cgtaaaaacagtcttatatttcttactttgcatcccgccttgccaacctaataaactactgatcgttgcagcggcgcctgcaggtgatgcaatagctgaagagagtccagctgcaaataatccgatactgatggcgaatggtgctgcatttccaagtacaggttcaagcggaccagcgagttgaatcacacttgtcacttctttaccttgtattaaagtagcagcagcaattaatatagctgctgaaataataccaccaatagaaattgaaatgacggtgtcccaacgtgcatattttaattctttaatattgccaaaacgtctaaaaactgttgctcgtgaaagagaaattgaacaaggtaaagcgaatcaataattcaattgaaagaggaggttactaaagtgagcgaaagaaatgatcgtaaagtttatgtaggtagagtcgtttccgataaaatggataaaacgataactgtacttgttgaaacatacaaaacacacaagttatatggtaaacgagtaaaatactctaaaaaatacaaaactcatgatgaaaacaactcagctaaattaggggacacagttaagatacaagagactcgtcctttatcagcaactaaacgtttccgtttggtagaaattgttgaagaatcagtaattatttaattaaatagtgaagataaaggaggttatactcagatcgcatcgttacgttggcgggtttgctataaacctatatattgttttagtttcctggttgttgtattcattgcttaagtatgtatactgtctttgattctttgtn

SEQ ID NO: 55 - DNA, 133791 bp, Staphylococcus saprophyticus
  misc_feature (35820)..(35820): n is a, c, g, or t
gacgtacgatagcttgatttgatattaaagttttagatttaccattagaaacaggactagttgcagaggttggacaaggtgatcaattcgttgcagttagaacagatattgatgcactaccaatagatgagcaagtgaaacatgaattcacttcgaccaatgaaggtgcgatgcatgcatgtggacatgatattcacatggctagtgtgctaggggtcgcagtgagattaaaagaaatagaaaatcaactcaacggacgcgtgcgcattatttttcaagctgcagaagaattgggctatggcgcagtgaaagttgctaatacaggtgcaattgacggtgcgaaagccgtgttaggttatcataattatccaacgttagatattggagaatttgcggttaaatcgggggttatcacatcttctgtagaccgtttcgaatttaaaattaaaggtaaaggtgcgcatgctgctaaaccagaacaaggtaaagacccaatgattgtattgggacagttgattaatagtgttcagtctattgtgagtagaaatttatcagcatttgataatgcagttgttacaattggagaagtatcatgtgggaatacatggaatgttattgcagacgaagcctatgtgcaaggtactgtgagaagttttgatgaagataaacgtgtactgattgaagaaagattaagagccattggaagcggacttgctgaagtatttggcgtagacattgaaacgtcttatcaccgcttgcccggtgctgtggttaatgatgagcaattaacaaatgatgcaatagcaattgccaaagaagttggatacaatgtcagtgttatggataaaccgttgacgattggcgaagatttttctggtttttctaataagtatccaagtgtatttgtctttattggttctaatagtgaatatgatttgcatcatccaaaatatgacccagatgaacgtattttagaaaaagtacctgactattttgttacttttgtacaaaaattattgaatgaaaattaaggcaatatacttaaattatgtattagacaatagaaatgttgggtatttaataactagttcataatttaaggagtgttcataatggcaggtcaagatccaagaactaaattttcaaataaagattttccaaaacaagaacaaccagttccaggtttacaaagtaagttagatccaaagcctgattgcggtgaaacatcctatactggttatggtcgtttaaatgattataaaatgttagttactggtggagactcagctataggcagagcagcagctattgcttacgctaaggaaggcgctgatgtagcaattaattatcttccagcagaacaacaagatgcagaagaagtacaacaagtcattgaagcagcaggaagaaaagctgtcttaattccaggtgacattagagatgaacaatttaattacgatttagttgaaacagcttacaacgaacttggcgggttagacaatgtaaccatcgtcgccggtcataaacaatatagagaaagcataaaaggttttgacacagcttcgttttcagaaacatttgagacgaatgtttatccaatattttggacagttcaaaaagcagtagattatttacaagctggtgcaaccattacgctgacctcttcagttcaaggttacaatccaagcccaattttacatgattatgctgcttcaaaagctgcgattatttcattaacgaaaagtctatccgaagaactcggtgcgaaaggcattcgtgtgaattgtgttgcgccaggaccattttggtcaccattacaaatttctggcggtcaaccgcaatctaaaattccgagctttggacaaaaggaagtcttgggcagagcaggtcaacctgtagaattatcaggcacatatgtacacttggcagctgaagaatccagttatacaacaggtcaagtatatggtgtgacaggtggtactcagttagactaggttatatgaaacgtcacagctaatgtggagatgattcaatcacattaaagttgtatcatctaaaccctgtgacttctagattgataagcgaatattacaatgagtcatatagccgacgttatatgggcgagattgagaaatcaaattcaatgtttggtttctgtctcgcttttttattatttttaaaaggagtataaatgtggatgaaacaatataacgcaaacacattaacgaaacaacagaattataaattattaagtggtagtgttattccaagaccagttgcatttgtgacaacacaggataaagatgggaatttaaatgctgcaccgttcagtttttttaatgttgtatgcagcgcacctcctatgattatgatttctactgcacgttcacaaggaaagcgcaaagatacatcgttaaatattgaagaaacaggctcatttgtagttcatattacagatgaaatgactgtagaacaaataaataaaacggctgcacctatagacagaacactaaatgaattagaaagaacgcagttgacatgtgtgaaatcagaagtcgtgcctgtaccaggtgtggaacaagccaaaattcgaatggaatgcaaactaaatcaaatcgttacattaggcgatgctcaagaaggatcagatttaatcattggtgaggttgtgatgtatcacattgatgaggcagtttactttgatgatagtaaaatagatgcacaagcattagcgcctgtggcacgtttagctggaaatgattatgcagcattaggacaatcatttacgattaatcgaccaacagagtaatttataaatgataagactgaagtcattagctcatcagctaattgttaagatttgttaaagtttaagcaagaatttaaaacagtaattgacgaaactaatttaatattgtactgtgaaaaataaattaaataacttatcaagagaagtggagggactggcctgtggatacttcggcaacatgattatgcgtgtgccaattccagtagcatcatttatgctagaagataagaataaatgtacaaagtttactctttcttcaattggaaagagttttttatttgagtaagtttatttaatggtagaaaaattgatgttctgtttgaacttaaaggaaagttggttttgtatggaggagacaaagaaaggtaatgcatgggcactgatacctttaattatttttgtgggtatgtttttaggtgttggtatcattaccggcgatttcactacaatgcccctaaatgttgcgatactagtagcgacaattgtgggacttgtattaaatagaaaagaatcatttcaaaagaaagttgaaatttttactaagggtgcaggacattccaatattatactaatgatgctcattttcttattagcaggagcgttttcgcaaacaactgaagatatgggtggcgtaaaatctacagtgaatttgggactatctttgattcctgagaatttaatcattgtaggtttattcgtgatatgtatgttcgtgtcactttctatgggtacatccgtgggcactgtagcagctatagcgcctgttggctttggactaagccaacaggcggatgtctctgcagccatcactatggcgacggtcgtaggtggggcgatgtttggtgataatttatcaatgatttcagatacaacgatagctgcggtaagaactcaaaaaacaaaaatgagtgataagtttaaggtgaatatcaaaatcgtgttacctggtgccatatttactgtcattgtactttggtttttaacaaatggagcacaaattgatgcatctaagagctacgattatgatcttataaaagtagtaccttatttatttgtactcatactcgcattattcggcgtcaacgttattattgtacttattggcggtattatactttcagcaattataggtttattttatggtacctttgattggattgggttattaagctctatttctaaagggattattggcatggaggatattgccattattgcactattaattggtggtctagtggcattgatacaacacaatggtggtattacatggttacttaattttgtgcgtaatagagtgaaatctaagcgtggcgcagaactaggaattgctggcttagtgagtgtggccgatatttcaactgctaataatacgatttctatattaatggcagggccattagctaaagacatttcagatgaatatggtgtagatccgcgtaaatcagcaagtattctagatatgtttgcaagctgtttccaaggactattaccgtatagtccacagcttattgcagcagcaggtgtggcatctatatcaccgtttgaattggtaccgtatgcgatttatccgatgatattagggatttgtggtctgattgctatcgcctttagattgccgagattggacaagaaataaaccctaacaatcatgtgaagtgaatatttcatatgtatggatgattaacagtcgtcatgcaaaattgttaagtttaatataaattgagagagtgcggaatcttatgtatcatttgatttctgactctcttttttaagtatagactaacggcgtagtacacgatgctttattaagtttaatcctaattgttaaagatttaagaatgcaaaattttgacgtttactgactattaacgataaaataaagttgttgaaagtttgataaaatcatacaaaccactcatatttcgcatgattatagtttagaagtcttgtataatgcgttagaatagaaataagagtgaaagtaggtgaacaatccatcgtggctaaatataatgtagagaatgaaaatgttgagatacgtcttgaacgattatttaaagttgaaccagaattgttatatcaagcgtggacagatgaacgttttcttaaacaatggtttatgacaacagaaagaacaaataaatcaatccaagtagatgctgaacaaaatggaaactatacgattattgatgtaagaaaaggcaaagaaaataaaattcaaggatcatatcgtacgttaacgccttttgaatatattgtaatgaccataggtatgccagagctaagtgattctgaagatacgatagaagttgaaatattcgaaagagaacctggcatcacacaaatgattttcaattatactgcgtatgttcctagagaacgtagacttacaacattagaatataagcaaaagaaaaaagaataccatgattctactgcacatggttttgaaatgttatttgataaactacaaattgcattagaaacatttgaagcggaattataattataaaaaacgacaaaatatcattttaatacaaataaaaaaaggacttacaagcatgctaaatgaatgatgtgcaccccaaaagttggactaaaaatctaacttttaggggtgtattttttatgggcaaacattacaaatatgaatttaaattaaaggtagttcaagaatatttgaatagtttattaggttatagagcattaacaaagaaatatgaaatatcgaataaaagtttaatcgaaaggtgggttacacaatataaagaatttggacccgaagggttaagtaaacgattgaaaataaagtgtttcaaagtatgtcaagaaagggaaattgtctcgataattcagttatggaaaacttttttggattattgaagcaagaaatgttttatggagaaaaatttgatcatttttatcaattggagctagctattcaaaactatattattttttataatgatgaaagaattaaatcaaaattcaaaggcttgtctcctaaaaattttaggaaacaaacctttgaaatattacactaaaccaaagtacaacttttggggttcagtacaaaatgaattgattgcttgtaagtcctttttttagtgtgtgttgagttcgcctttttcttggcgttcattatatttccgtagcaatgtttcgaaaaagatatgataactgataaagctagagtaatctataccatctacgagataaaacgtattactcgaaacatagatattataatttgctttttgtgctagcgtgttatctttcaatgtagttactgagaaaaagtatttttgacgcagttgcagtaaattagtgatatctgaaagttgcgttgtttctccggaaagcgaaatgataaaaaagatatctttcggtgttgctttatttaagaccattttaaattcatgaacatcatgtaggacaataatattcttatgaattgttaataaaatccgttgtgcttcttgagcaacattcatctgagctaaacctgtaccgtatagatagaccgtttcggcttggttaattttatcggtaatcagttcataatcaatgcgctctaaataagtgaacgtattttcaatttcttgtttaaatccttcaatagagtcggaaggcagctgatgtgattgttctgtttcaaattttaaataagatttaaaatcactgtatccgtcaaacccaagcttacgtgtaaaacgatggatcgtcgcattggatgcatgggtactcgcagctaattcttgtattttcatcgttttacattgattaatatgtgtattaataaaatgtgctatatgtaaatcattttcgtttaatttattaaagttattattgacgcgttcatctaaaaacaatggtaatcacctcacacttaatgaaaatattttcaacttttgaaaatataatctgattatacaaaattattccaaatgacgtcaaactattgtttttatgtaagcgtttcctttaatattaagcataagcaatgaatacgattgaatataataaaaaagtatagatgtttaaaattttgaaaattgaactgataggaaatgagggaacacagttatgaacgcaattaaaaggtttggtagtgcaatgatcgtacctgtattaatgtttgctttctttggtattgtacttgggtttgcaacactatttaaaaatccatcaattatggggagtattgcagaagaaggaacgaattggtttaagatttggtctgtgattgaatcaggtggttggacgatatttaatcacatggaaatcgtctttgtagtaggtttacctttatcattagctaagaaagcaccgggacacgctgccttagctgccttaatgggttacttaatgtttaatacatttatcaatgcaatacttacgcaatggccacatacatttggcgcaaatttggaaaaaggcgttgaaaatgtaacaggccttaaagcgattgctggtatagaaacgctcgatacaaacatattaggcggtattatcatctccagtatcataacttggatacataatcgctattacagtaaacgtcttcctgaaatgttaggggtattccaaggattgacctttgttgttacgatttcattctttgttatgttgccagttgcattaattacttgtattatttggccaactgtacaaggaggcatttcatcattacaaggatttatcataggttcaggttatattggtgtatggttgtaccatttcttagagagagtgctcattccaactggcctacatcatttcatttatgcaccaattgaagtcggcccagtagtagttaatcacggtttgaaagccgaatggttcgaacatgtcaatgagtttgctaagagtacgaaaccattaaaagaacaatttccttatggctttatgctacaaggtaatggtaaagtatttggtgctattggtattgctttagcaatgtactctacgacacctaaagagaataaaaagaaaattgcagcattacttataccagcaacattaactgcagtcgttgtaggtattacggaaccattagaatttacattcttatttattgcaccttatttatttgtattacatgcattattagctgctacaatggatacattaatgtatggatttggtcttgtcggtaattttggcgggggacttttagacttcttcgcaacaaactggattcctttagcacaaaaccattggctaacatacgtattccaaataattattggtcttgtatttacagcaatatattacttcttatttagatttttaattttaaaattcaatattccacttcctggtcgtaaaaaagatgaagaagatgtgaaattgtatagtaaacatgattataaagataaaaaaggagaaacaaaaacaactgcatctactggaaatgagtatgaagataaagcaatttattatttagagggcttaggtggtaaggaaaatattaaagatgttactaattgtacgacacgtttgagattgactgttaatgatccagagaaagtagaagatagtgggtattttacgcataaccaaatgtcgcatggattagttaagagtggtaagaacgtacaagtcgttgtaggtatgtctgtgccacaagtaagagaggcttttgaaaatatagtgaatgaatcgcagtaaagtatagtggattttagggagtgggacagaaatcaaattttctaatagagatttcgtggtcccaccccggcaaggatgactaggattgaaaatagcttgatataagcgcattttcacttcagtcatctactgcctaaatgaaaaagggtctgagacatctatttttgtctcagactctacttagttatattggaattagttcatgtcaacgctattttaggaaaaacgatatgtcatgcttattccaaatttatgtgaagtttatgaaattcttactttatgcatcagtcttggttggtatactgctccgagtacatctatattatgtgttgcaactaaatatattaattttgcaaatatagaaggtgaacatgaaacatttatcttgtttctattgaaggtataagagatatagtcagtttgattgattaaattcatgatgtcgatgactttatcttttataaatgcatcatgtagaccatctacgactaattcaaaacgtttcgaggataataataagtgatctaatgctaacagttcatctgaatgtgcactttctagtatttgatagatggcataattatgaaaacttaaaaagctaatcaaatatggtagctgttgtttcggtaaatttatctctaaagcatataaattatttttcttgaaaatagtgaatttaaaagaattacaaaagtgaatttgttttaaaagttttgttaagtgctttctcgtcgcgcgcttaccaagaccttcaatatttaacacaaacgtttcagttttatctaaaaacatattatacccccaatatctatataaagtgttttatcgttattaatcataatattctattacacttaaatttttacatatttatatttctattagattgtaccactcttttttacagtaagcactaggtctatagaatgaagttgaaaaaaatttaaacactagtatttaaaaaattagaatatttagaaaattcagttgtttgagggcttaaagtatgatacatttttctttgttaatacatagagggaagtgtttaagatgttatcaaaagttagtagatttgccaccaacacattcttagtatggatgttaattgctgcaattattggatttatttttccagcacagttagctacattgagcggatgggtaccatatttattgggtattgtgatgttggggatggggttaacaattgatcccaaagactttaaaattgtatttcagtcgccacgttcagttattattggcgtcattttacaatatacgattatgccattaacggcatttttaatagcaaaattatttcatttaccaccagaagttgcaattggtgttatattagtaggctgttgtccaggagggacatcaagtaacgttatgagttacttagctaatgcgaatgttgcgctatcagttgccatcacaagtgtttcaactttacttgcgccaattatgacaccagcattaatatatttatttgcgcatgaatggctacaagtttcattcatgagtatgttttggtcagtcattcaagttatattgataccgatattgattggttttatattacaaaaggtattcaaaaattttgcggccaaatctgctacggcattgccaattgtatctgtagttgctatttcattaattttagcatcagtcgttggagggagtaaatcacagattcttgaaactggtttattaatctttgctgttgttatcttgcataatatagtaggttatacacttggttatacgctagcacgtatatttaaactagagagagcagacaagaaagcagtatctattgaagttggaatgcaaaattctggtctggcagtatcgttagcgactgtgcattttagtccgctagcagctgttccgggtgcagtatttagtttagtacataatattacaggaccaattttagcaaaatactggaataaacgttacaatcttaatcaacagtgggtacacaaatgacactacgactttaagtagtgaatttaggtacccactttttttggtgtgaaattgataagataaagaagattaattacacttgaaattatgataagctattactaaatagaaacgattaaattattgaattgtgaagcaattattggaggcatattcatgtataaagcagtggtatttgattttgatggtacgatgattgatacagaaaaacatctatttgaaatcatcaataaacatttaaaacagcataagcaaaatgaaattagcttagactattatcgacaatcgattggtggtgctgcaaccgcattacataattatttagaggaagtacttggtattgacaataaaaataaaatttatgaagagcatcatgaaacaagtgtggatttaccgattattgaatctgtacaaaagttaatggattattgtaaacaacgccatataccaatggcaatcgcaacaagtagttatcgagaagatattctgccaacatttaaaaacttaggtttagatgcttatatagatattattgtaggacgtgaggatgttgcagcaattaaaccgaatccagatccatatttaacagcagtgcaaaaactaaattacaatcctacgaattgtcttgcgttagaagactctgttaatggtgccacggctgctgttaccgcaggattagatgtcattgttaatacaaacgagatgacagaattacaagattttaatgaggttgcttatataggaaaagatttatctgcagaagagattataaaattatgttttgaaaataataggggttaatactatgaatggttatttgatattgtttttcttaggtggacctatcatattagcgattggtaatttagtactaggacctatttttaataaaaagataccgtttcatattcatttccgttcgtttatggtgggtactttagtttatttattaggcgcagcagcactttattattttgtcttacaaaatcaattttgatattaaaaaaggctgtcgtgttaaaacacggcagccattttatgtttctatgataaaaatttaaatagaagtgttacgataacaagaataagtagaatcgcatcgattcccaccataatggcaaaacgaggattcttttcacctgtttcttttgattttttaacagctttaaggttgggtatcaaacttacgattaacaaaatcataacaacgacgcctaagataatactcatgatttgtcaccaccatttttattttttgcaataaattcccatacataaccagcaataatcccgagaattaagccaatgacaatacctactttcagagcggagaatatcgcactaatgagtattgcaataagtaatgcgattggaatggttattccaaatttatattttctttcaggtgaatttactatagagaaaagcacaaaatataaaatgccaaagacaacgatgacaagtatactttttaatatgagttgcccaatggaactatcggaaccactaaaataatttaatacgaaaaataacacaccaaaaatgatggaaatcgtaattgtacgtttcagtaagtgttgattcatataaaactcctttgtaatcaaatctaataaagagtataccatacaatgtatttaagttaatgtttcactggtttagttgatactttgtgatcatattgatggtgatcatttaaatatgcatagaataaacctataattaaaccacccccgatataattcccaatacctgcaccaatcagattgataactgcaggagttaaagctaatacgttactatgataaatgagaccgcctgcgaaaaggacagtattgtatacgacatgttcataacccataaatgcaaaaattgacacaccaaacatcatgacaaacattttagctaaaatatcatctatttgcatcgcaatgactaaagaaatattaatgaagaaatttgcaaaaatacctttaattaatatcgctatcaaacttgaagataatgttttatgttcaatggttgcctctaattgcgtaaacatatcaactgtcataacatcagagccttttaatataagaaagaaaactaggccacctaaggcattcccaataaagcaaagcatgaagatttttaaaacacgagttggactgataacgcgataatataaaccaacagtaaaatacataaagttgcttgtcagtagctctgaatttgtaaatagtattaaaacaagcgcaaaactaaatgcgacagcagccactaaattgataacacctgtgggaacatgtgtatcaagagaagctttaataagtaatacaaatactgtgatgacacctaatataaatccagccatgatggcgcgaagtaaataacgtttgaaataaaaactttgaagtatatcctttgttcttattgtatctactacatgatttatccaagatttaccgtaaaagactttatcccatttaacatttttttcgttcactttattatcctcactttctttaattaagcatagtatactacgaagtgattaaattgtgaatattttcacaaaatatattttgataagctataaagtatttaagtgatgtttgaataaaatgaattttccttatgagcctaaatcattgaatatcatgcgcaaagtactgatggatagtgatatggtgctttctttaaaacttatttatatagatgtttaaaacctatatttaaaaaatgtaggattgaagtaataaaataataaaaaaagactttgcttttttttactaaaatcgcatacaattaatgacggaaaatgtaaacccttacataattcaaaataattgtttaaattttttgaatttatagtataatagcgacataataagtgaaatgaaatttacttatatttgaaagagatggggtttgaatgatggaagaaaataatgaattaaaaaggggattaggtgctcgtcaaatgcgtatgatcgctcttggcggaacaatcggtgttggattgtttatgggggcaaccagcactataaaatggacaggtccttctgtgatattcgcatatttaattgcaggtatctttttattcttagtaatgagagcaatgggagaaatggtttacttacatccaacttctggttcttttgctaactttgcaagtgattacatacatccagtggcagggtacttaacagcttggagtaatatattccaatgggttgttgtaggaatgagtgaggtcattgccgttggagaatatatgaactactggttcccagatttaccacagtggattcctggtgttattgtggttgcactattagcaggtgcaaaccttgtatctgttaaggcgttcggtgaatttgaattctggtttgcaatgattaaagttgtaacaattatattaatgattgttgctggctttggattaattttctttggacttggtaatggtggagaagcgatcggcttatctaatttatggtcacatggtggtttcatgcctaatggttggattggattcttctttgcgctatcaattgttattggttcatatcaaggtgtggaattaattggtattacagctggtgagacgaaagatccgcagaaaaatattaaaagtgcggttaatggtgttatctggcgtatattaattttctatattggtgcaatttttgtgattgttactgtttatccatgggatgaattaggaaacataggtagtccttttgtagcaacatttgcgaaagtaggtattacctttgcagctggtttaattaactttgttgtattgactgcagcaatgtcaggttgtaactcaggtatattcagtgctagtcgtatgacattgaacttatctcaaaaaggcatgttacctaaattctttggtaaagttatgaaaaatggtgttccaatttggactgtacttgccattgcaattggtattttaattggtgcattattaaatgttatcttacctttattcattaaaggtgcagacagtatctttgtttacgtatatagtgcgtcaatcttacctggtatggtaccgtggtttatgattttaattagtcatttaagatttagaaaaaatcatcctgacgaattagatggtcacccattcaagatgcctggtggtgctataacaaactatattacgatggcattctttataatggtattgattggtatgttgtttaataaagaaaccgtcgtttcagttgtaattggtattatattcttattatttatgacattattctttttcttaaaaggctaccataaattgagtaaagacaaactgatataagtaaagtaaatattagaaatagcttgaatgcttattgaagtataacgagtctgagacaaaaatagatgtctcaggctctgtttgtttttttattaaaataatttcaacataaaaggtttcatatttatttaataagctatttatattcataatatagttaatttacagaaaattaactatattaaaatgttcactcaaaactagtgttttaaactgaatgtgtagcacgataatacatattaaaggagttattaatttatgaaaatcttcaataggttagcaactatttctgtagcaagtgcaattgtggctggtacagcattggggagtgcacaaccaacttatgcatcaggcggaggacaagattcaaatcaaaatgatgaagtttcatatatgggaaatactaaaaatcctaaaaatgtgattttccttgtgggcgatggtatgggaccttcatataactctgcataccgttattttgcagataatcctgaaacaaaagaaatggataaaacagcatttgatcattatttagcaggtaaccaacgtacaaatccagatgatccaaaagaaaatgtaacggattcagctgctggggcaactgcttttagttctggtcataaaacatataatggtgcaattggtgttgatgaaaataaaaaggatgttaaaactgttttagaacaagctaaagaaaatggtaagtcaactggacttgtgtctactgctgaacttacggatgctacaccagcagcttatgcgtcacatgttgatgatcgtgataaaaaagatgaaattgcgcaacaattttataatgataaaataaatggccaacacaaagtggacgtgctacttggtggcggtgctgaatatttcggaaaagagaatggtaacctcacagataaattaaaaaaagatggttatgatattgtgaagaataaatcgcaaatgcaaaactctaatagcaagcaaatactaggtttatttgcagataatgatatgcctttacaaattgatgcaccaaaacaaaatccaaaacttgttgatatgacagatactgctgttaataaattgaaacaaaatgataaaggattcttcttaatggtagagggtgcttcaattgataaatctggtcatcctaatgatgttactggcgtaatgtctgaaatgcaaggttttgaaaaagcatttgactatgcaacacaatacgctaaagcaaatccagatacgctagtcgttgcgactgctgaccattcaacaggtgggttatccattgctaagggtaaagactacgtttggaatccagatgcgattcactcaatgaaacattcaggttcttatatgacaaagcaaattgctagtggtaaagacgctgcgaaagtcattaaagagggttatggatttgatgtaaaacaaagtcaaattgataaaattaatgaagaagctaaaaaattaaaagatcttgatgaagatgacgaaaaatataaagatcaattacaaaaactacaagatgcagtacaaaaaccaattaacgataagtctaatactggatggacaacgtatggtcatactggtgaagatgtaaatacttatgcatttggtccaggtagtgaccgattccaaggtaacattgataatacagataatgccaaaaacatctttgattttttcaaaaatgatcaatcatcttaattcaatttcataactaagaaaacaaataaaacactttctctaagttcacaatacaatgtgatcattagggaaagtgtttttttttgtaaaaagtaattagtgtttaaaccgaatggtagataaatgcttacgataattatctaaagccattttagattgtgtaattgaatccagtgcactttggtaatttaaggcaatatagcgataatataaaatatcaacagtaaacaattgtgcgaatagagatgtcgtggcagccatgcgcaattcattttcatctgtttggccataaataatggtgtaatctgatattttagcaactggattatcatttgaactagaaattgtaataataggtatcgtataatctttagcgacttttgccatggattgcatttcgctatgactaccttgattcgtaacaaaaataatacagtcacgttcatcatgggtagctagcgtcgacatgaataaatgcgtctcttgaagtagacgaacattaagtcctatgcgcgataatttttggaaaaggtcagtcactatcacgagagaggcaccatagccaaatagaaagattgtacgtgcacgcttcatcgtatcgcatatgtgatctatcatttggtcatcaatatgattagatacataattcatcgtatcagtgacacgagataacattttgtttttaagtgtatctacagattcattatctacaagttctagatgattattgttaattgcatcattaggtaaataacgagatatagcgattttaagctcttgaaatccttttccagttattttcttactaaatctaacaatggatgcagtacttgtatcaatttcatttgataaatcttggacagacatatttatcattttatgcggtgtaattagtatgaagtcagcgatttttttctcgcttttagttaattgattataattgctatcaattttataaagtacgttggtcattttaatcacctagtgtatcagattctcgcatagctttcgttgtaccaaagaaataggtgaatatgaaaccacctgcatatgctacgagtagtcctgcaatgtaacctaaatacatatgatctgaaatcaaaggtaataaagaaataccacttggtccaattgcagttgcgcctatgtgaccaataccacctatgactgcaccgccaataccgccaccaatacaagcagtaatgaatggcttgcctagtggtaatgtcacaccataaattaatggctctccaatgcctaaaaatcctactggcaaagcacctttcagtgtgtctcttaaggttgtatttttacgacatcttacccaaagtgcaagcgctgcaccaacttgtccagcacctgccattgctgcaataggaagtaaataagtagcacctgtttgattaatcatttcaatgtgaataggcgtaaacatatgatgtaatcctaacataactaatggtaggaagaatgcaccgatgataaagccgctaaagacgccgccaatatcgatgatgccgttaatcacagtaacaagtccgtcagaaacgaacccagctaaaggcataaatataaagattgttaacaaaccaatgataaataaagtgattgtaggcgtaacaataatgtcgattgaattagggacgattttatgtagacgtttctctataatactgagtaaccaaactgcaaagattacgccaataataccaccttggccaggttgaaggggttcaccagtaaaaatattagtaatcatatttttgtctgttaatcccgtcaataatgttgtaccaccgatgacgccacctaaaccaggtgtagcaccaaattcttttgcagcattgatgccagtgaagatagcgaggtaggctaacataccatctttgataacgttaaataccgtaacaagttgagttacccactcgccagaaatttgtcctgctgctaataagttacttaatacagcggcgataccgccaattaaacccgcaccaataaatgcaggaattaaaggtatgaaaatattagctatggtctttaataatttattgaatttaccacgtttttgtttactttggaattcagatttatttgcttgggcttgtgcttcggcatttgcacggtagtctttcgatttatgtttgattgtttctcctaaaggggcaccgcttaattcggacatgtgagatgccactttattaaccgttcctggccctacaacgacttgtacacggtcatctttaactacgcccataacacctttaattgattttagttgttcgtaatcaattttatcttcatcgagtactttaattctaacgcgagtcatacaattaatgatattatccatattatcgatgccaccaaccgcgtcaatgatatgttctgctaatatttgctcttttgtcataatataacctcctcttatattgaatacaggtaatcattcttgaataaatttgcttagtgatatcgtggtgaattaattctgtattgcttttttaatgatatgattattatcgttaagtcgagtaacggcttcagatttattaatatcgcagagatgcatgacgacggctacttttaagttttgatcagcggattcataaagtgattgcgcttgattatatgaaatgtcacatatgtcttgaataatccgtatggaacgatctattaacttttggtttgttgcttttacatctaccatgaggttatcgtaaactttaccaacacctaccattgtaattgtggaaatcatattcaatattaacttttgcgctgttccagatttcaatcttgttgagccagttaatacttctggtcctacattcacttcgattggatattgtgctaggtcacttattttggtgtttgtgttacaagatatagcgactgtgtgtgctccaatctctgtagcacatttgagtccgcccataacatagggcgtgctgccgctagctgcaataccaataacaacatctttttcatttagatgtatatgttttaagtcttcacgcgcaagcgactcactatcttctgcaccttcaactgctactgtcattgcacgttgtccaccagctatgagtccaataacttcattagttgaagtattaaaagtcggtacacattctgctgcatcgaggacacctaaacgaccactggttccagccccgatataaatgatgcgaccaccttgtttaaattgttccgttgtaactttaattacttctgctaattttggtaatatatcatgaatttgttggggtactttttgatcttcagcattcatagtttctaaggcttgtataatggacatttcatctaaatgcatggttgcttcatttcttgcttcagtcatagaattattcataaatttcagctccttgtttgtataataaattcaaaggtatcattaggacgtaagcaatcaatgagcggtatatcatcgtcaataatttgaccaacaacatttatatgttcgtgagggtgtaaatctgtcttgataatttgcagttctccttgatagcgaccattgagttggttgtctacggtaatagcgcctgtttttcggatatgattaaattgaggttttatatctgattgacaataatgacgtgcttcttgtgagcgcagtacatttgctgggttatcgatacggacgctatgtcgttttgataatatggatttaacttgtaagtcttttaatgtgatagataaagtgaaatgtctttgtgttaaaagtgatatgagtttatgagcgtatcgttgtgttatttgtgtatcgccaaccatgatatggtttactgattgatctagtaatagttgagcacttttaagggggtgcatatatctcgagcattcgagtgttggtaatcctctataaagtgggccacgttttgtagttccaactataaagccatagatattggcattaggattaaatttcaaaattaatttattttgagcgttaacaaaatctgtcgttaatccagtatctggacgaggataatagttatgacaatagcatatataactaaaatcatttaactgagtatataactgttgcaacaattgttcggatacaatactggcattgagacaacattggaatccattttcaataatttcattgacaatatcaatagaagtactatgatctacgcgaataataaaatgcgcctgctgatattgcttcaagaattgatagaaagattgattcagcaatgaaggattgatatcaatcatataagtcagctgatcgtttgatagatagtctaaaagttctcccaaatagcgatatttagtattctcattgtcttcaggaatttgaactgaagtgaaaatagtcgtgtatcctaaatcaaccatgcgtcttatatatgatttatcgatggattgaccaagataaatagaaaaaccatgcatttttaccactcctttaatgctgtaatcggtttcattgtacaacatatgaaaaagtattacaatttgaatttctatttttatttaaaatgaaattttattacaaataataggaaagtacttgatggatatgcattaaacgttgttggataagttcgatatgtttcgtggtattgccgatcgttaattcgtcgagcggttgttccatttgattgcttaaaaaagtaaagtaattataatgaaaaagggataattgatacaaagcatcttgtttaaattcagtatattcttgctctataaaatcatgaacatcctgtttatattgaagtttctttttatgattggtaacataagcaaatttatatatctcgattaaattgagtaacttggttatacgtttttctaagttgtgaaattctaggtgatacatagaatcatcctttcgttaaattgtggcataataaacaataaataagcgaagggtttttaaaattttacaatgcaatggcagaattatagatgaagtttttagtagtgtctaaaagtaggttaattagaagaagtagagtacagaattaactgagtagtggaggtatagataattatattttattaaatatatggataaagaacatccaactgaacattaggactcagttggatttaaaaattgttgataattattgacggtaatatcttgtgttttgattgttttgccaaaagaatacgaaatatcatgaatatcaacaatggggatttcatttgttttaccaagtccaatttcaaaaatgacagccttccaaagtccttcatcacaaagtaatccaatgaaaataacattttcagttacaatatcagtacgattattatattccacggccatcacatttctttctgtacagtagatgagtacctctgagaatatagggggtaaattgagatgttcactatgatcaaatttaatataacgatctaatttttttaaataacgtctcatttttgtataaggtaaatttaagcattttttaataattgcatttatttcttctttataaggcagtgttgaataagattgactttcattcaaaactaggaataaagcagataattggttttcagttagctcaatttcataactatttggtgtttcttgcaattggtaaccacccaacttaccatgttttgccaaaatcttaacaccttgatcttctaaatcttgaatgtctcttaaaatcgtccttttggatacatttaaatccgtcgctaattctgaagcagtaatctgtctattctcttgaatagctagaacaagtttattttgtctttcgcgtttattcattagaaagttacctcccaaatgattacatattacatttattatatcacaaaagtgacaatgatgacatttagaaaaattttttcgagaaatttaaagaaaacgcttacatttatgaggaggttatgttagtatataactagtaacaaaggggtagcgaatagatggcaaaggggtaggctattacatatagttttgttaacatctatttgttcgagttactaatcaaacatcttcaatatttattacttactttcctttctatttaaccggctagcgacgctagtcggttttattttgtaattattgagtatataaatggtattttgattaactgtattttaatcgtagccaaataacatgtatttcaatgcggattctgtgataaaataaaacaattatatagcgtatataggttcggtttatattatttaaatgaagaggtgtatctcatatggaaaaagaacaacttattaaaatagatgattcaattcatgcttggtttaatacgttagatgacattattccaaagttaatcaatgatatggttacaagtactaaaaaaaacaggtttgatttagtgaccaatgtagataaatccattcaacaaaagttcgagtcatttttaaaagaacattatcctagtcatcagttatttgcagaagagaagtctaatagtgaaatcaatgctaaagaaggtcatgtttggattatggatccaatcgatggtacaaccaacttagttaagcaacaagaagattattgtattatcttagggtattttgtagaaggtgagcctatgctgtcatatatttatgattatccacatggcaaactttataaagcagtcagaggattcggagcttatgtaaatggcgagccattatcatcgccagaagatatcgagttaaaagatgcgattatttcttataatccattagtaattaatgatgaaacgattcaagatttgaacgaggcatcatttggataccgttgtattggctcatgtggactagattcaatacgtgtaattaaaggtcagtttggtgcacatgtcaacacgaatccgaagccatgggacatagcagcacaatttttatttgcaagtgaacttggcttgaaaatgaccacattggataatacaaagttagatttttcaacagcaggtccgtttattattagtaataaagcttgtcatacacatatgttagatgtacttaattcaggtaatggatataaaaattaggaaatcacaaaaaatgttttagttttattatttattaaataaataataggtctaaagaactatgtcttatttattatattactatataatgtattattaaatagagtagaaaattgacatagaaatggagaatgataagagtgaatcgttctgaaaaaaataaaaaaatgggcttaccgacaaaagttttcttgtggtttataggcatattagtgctgctagcattaattgcagtcatatatcttggctataaaatattttctgttggaggatctatccataaccctcttgatagagataaatcatcattaagagataaaagtgtgaatttggatgatggagatccatttactattgcattatttggcgtagattctaatgcagaaagaaatgctaacggcggtggacaacgtagtgacacgattatggtactatccgttaatccagaaaagaaaacaactgaaatcgttagtatacctagagatacacaagcagatattgttggtaaagggacaactgaaaaaattaaccacgcatatgcatatggtgggcctgacatggcagtgaagtctctagaaaaattattaaatgtaccgattgaccattacgcaacaattgatatggatggtatgcaagatatgattgacactgttggtggtattacagtaacaagtaacgcaactttctcttatgacggttatcaatttactgaaggtgaacggtctaaaatggatggtaaagaagccatggcgtttatcagaagtcgtaaagaagatggagctggtggcgattttggacgtcaagaacgtcaacaacttgttattcaaggccttgccaataaacttacaagtgtgagttctattacgcattttaattctttaatgaatcatgttgaagataatgtgaagacagatttatcagtcggtgaattaaataaagtaagaagtaattataaagatgcaaatgacaatgtaaatagacatcaattagaaggccaaggtggcattcaagatgacggactatattactttgtacctagtgaaaattcattaaatgaaattgagacaaacgtaaaagataatttaggtatttaatataagaatagcgcgtgagaaatcaaatctgatttaaaaattagattggtttttcacgcgtttttaattgagtacaaaaaagctattttaataatcaatgagattgtagattgaatagaatctgatgcatagcgctgttaaacattgtgctatttaataaaaaaataaagaatataatgaaataccttaacaattgagaaaaatacctatacaatagtattaacattattttaaaaagtgtggggcttttagatgtaatgttacaaaacatcttatgaagttaaatacatgggcgaaaatatataataggggtgaagactatgcaagaacatttgattgtctcgttagacggcaaagattatcttgttgaacctggaaccaatttactacagtttattaaatcacaagatacatttgtgccttcaatatgttacaacgaatcattaggtcctatccaaacatgtgatacctgtactgtagaaatcgacggtaaaatggaacgtgcttgtagtaccacaattgatagaccaatgattgttaatacgcaaaatgacaaagtacaagccagccaaaaagaagcgttagatcgcattttagaaaaacatatgctttattgtacggtgtgtgattacaacaatggtgattgtgaaattcataatacgatggaccaatggggtcttgaacatcaaacatatgaatataaagagaagccatacgaaaaagattatggcccattctaccgttatgatccaaatcaatgtatcctgtgtggacgttgtgtggaagtatgtcaagacgtacaagtaaatgagactttaacaattgactgggaacgtcaacaaccgcgcgttatatgggataacgatacttctataaatgattcttcttgcgtgggatgtggacaatgtgcaacagtttgtccatgtaacgcgatgttggaagttaatatggaaggtaatgcaggttatatgactgacctagaacctggttcattagcggcaatgattgatttaacgaaaaaagcagaaccaggatacggtccattatttgctgtttcagattcagaagcggcaatgcgtgaggaacgcatcgaaaaaactaaaactgtatgtacatattgcggtgtaggttgttctttcgatgtttggacaaaaaatcgtgaagtattaaaagtgcaaccacaacatgaatcaccagcaaataaaatctcttcttgtgttaaaggtaaatttggttgggattatgttgattctgatgaacgtttaacaaagccattagtgcgtaaaaatggtcagtttgaagaagtggaatgggaagaagcactctcagtagtagctgaaaactttaataaagtaaaaggaactcatggttcagatggtttagcatttatttcatcatccaaagcaacgaacgaagagtcatatttaatgcaaaaattagctagacaagtcattggtacgaataatgtggataactgttcacgttattgccaagcgcctgctactaaaggtttatttagaacagtcggtcatggtggtgactctggttcaattgaagatcttgaaatagctgatatggttgtcttgataggtacaaatacagctgaagcacatccagttatcgcgtcacgaattaaacgtggtcataaactttataataatacattaaatgtatttgatattcgtaagcatgaaatggcggaacgtgctgataatttctatcaaccaaaaccaggtacagacttagtatggttatcagcagtgacaaaatatattatcgatgaagatttacatgacaaagcattcattaatgaatgggtaaatcattttgatgaatattacaaatcattagcgccatacacaatggaatttgcggaagaaacaacaggtatctctaaagatgcgttaattgattttgcacatcaagttgcagatgctaaatctgtctctatagcatgggctatgggtgttacacaacaagatatcggtagtgatacatcgactgcgatttctaacttgttattagcgacaggtaactacagaaaaccaggttcaggcgcgtatcctttacgtggacataataacgtacaaggatgtagtgatatgggaagcatgccagaccaattccctggctatcaaaaagtgactgatgatgaaattagagccaaattcgaacgtgaatatggtgaaacattaccaaaacaagtaggaaaagataaccatcaaatgatggaaggtatccacaatggcgaaattgattcattatatttatatggtgaagatacgggtattgttgattctaatattaactttgtacaagctgctttagagaaagttggtttcctagttgtacaagatgagttctttacattcactgctacttatgcagatgtcgtgttaccagcaagcccatcattagaaaaaacaggtacttttacgaatacggaacgtcgtatccaacgtttgttccaagcactagaaccaaaaggtgattcaaaaccagattggcaaattatacaagcagttgctaaggcaatgggatatgattggaattatacacatccaagtcaaatcatggacgagattgcacgtctaacaccactttattctggtgtgaattatgatagattagaaggatacaatagtttacaatggccagtagctgaagatggtacggatgagccaatactttatcttgaagggtttaattttgaagataagaaagctaatttctatccattaacatttgataatttctttaaagtgaatgaagaatatgatttgcatgtaaataatggtagattattagaacatttccatgaaggtaatatgacttataaagtacctggacttgaatataaagtacctaatgctttcgttgaagtctcaccagagcttgcagaggatagaggtatccatgaaggtgcagaaattaaattgatttctgaaacgggtgaagttgagcttgtagcacatgtcacagatagagtaaaaggcaaagaaatttatattccgttaaataacaatgcaatggcacatggtgatcatggtgcgattaatctattaactaatagtgatgttgataaagatacagatacaccatcatataaacgtacaagttgtcgcatggaagtgaagacacgtagaggtaaatcaccattgaatcctacgaacttccgtgttaataagcaacgtcaaccgcaatatagtgttcgtgttcaagataaatggaagcgtgaagattatactttcccaggaagtcaggtggatagataatggctgagagaatcacacagattaaacgcatgcaaaaatcagaagcagaactcaaggaagaaagtttaactgaagtgacagatgcaattgttgctaataaggatagcattttaaaagcaatcaatatcattagtacactagacgatgctaagctattagatgcaatgtctggtgcggttaagagtagaggtgtgattgccaataaattcgctgtagaattaaataaagagcaatacactggtttaatttcaaacatggcatcacttgtatttttacttggtgatttaaatgtggatgatttaacaacaatgttaaataaagtaaacaaaggattaagtgttgctaataaggcaaatccaaatcaaaaaacgtcaattactggattgatgggtatcttgaaagacgatgaaatgaaccgtagtttaacgtatatgttaaatatgttaagaggtatgtctagagattaaccatgggccttgtaaggcataattcattagatatttaatgagcgttacaattcataagttcaataacgaggaatgtgcataagagatcaaataatcattttggtttctagcacgttccttttttgtgttttataaaatgacatattgaaacaaagctaaatgtgatacaatttctaatgtcggtattaattttaatcaattatttatagcaaggagtggaagtcttatcagcccgaaaatggtaaaaatcttagctattatttcaaatgtattattagtgattggtatagtatttttgatcactttaaatatagcaatggcaataaccatgtttgttgcgtctcttgcaataagcttaaccatatttaatacattatttagagagcgaacagcgatgaaaattataatcaatatttcatttgtaatagttttaattgctattatatttgcttatgttacattaacaaaataagtgcaagatgaggagtttttcacgaaatgaatgacaacataaagcgtaaaatacctatgtttattataattttaatattagttgtttttgcaatcttatttattgttaatgaaacccatttatttgatgacgaaaaaacacatacttttgatgaagctgttgaaaaacaagtaggtgctggtacattaaatatgacagagaaaaatgggcgatttgttgaagcgtctaaaaaagatgtagaaaaagcaatggatgtaaatagtgacaaagataacttaaatcatatggatatttctgaaaaagtgtccatgtctgaagaagaactcaatagtattttaaaagataaaggtattttaaaaaataaagggcaagcatttttagatgctcaagataaatatgaagtgaatgtcctgtaccttgtaagtcatgcacttgttgagacaggaaatggcaaatcagagcttgctaagggcatagaagttgatggtaaaacatattttaatttttacggcattggtgcttttgatgagaatgcagttcatacaggtagcagttttgcaaaaaaacaaaaatggacatcacctgaaaaggcaattatgggtggtgcgcgctttgtgagaggtaactactttgaaaataatcaactctccttgtaccaaatgcgctggaatcctaagtcaccaggagaacatcaatatgcaagtgatattgaatgggatgagaacattgctacgtttatgaaacattattatcatcaactaggtataaaaaaagatcatattaataaagactactatctataaatgaagatataacaaaacatttgaaagagagtcatattaataatgaagaaattgggaaatttggagtgaattaaaagatgaaaatagctatagtgggtgctggaatcggtggattaacagctgcagcattattatgtgaacaaggacacgaagttaaagtttttgaaaaaaatagcactattacagaagtcggtgcaggcattggtatcggtggtaatgtcattgacaaacttgggaaacatgatttagcaaaaggtattaaaaacataggtcaagttatcaatgttatggaaatattagatgataaagataatgtgttaagtaaagcaaaattgaagaaaaacacagtgaatttaacaatgacgcgtcaaagtttaattgatgtaattaaatcatacgtttctgaatctgctatttatactaatcaccatgttacgcatgttgataataatgctttaaaagttgtgatgcattttgaagcacaagaagcagaagcatttgatttatgtattggtgctgatggacttcattcgaacataagacatactgtagcacctaatagtaaaacacagtatcaaggatatacggtgtttagaggtcttgtagaagatatagatattaagtctgataatgttgcaaaagagtattggtctgcaaaaggtagagtaggtgtcgtaccgttattaaataatcaagcttattggtttatttcaatcaatgcgaaagaaaatgatgcgacaatgcaatcctatggtaagccacatttacaagctagatttaatcattttccaaatgaagttagaaaagtgttagataaacaaagtgaaacagatattctattacatgatatttatgatttacaaccactaaaaactttcgtctatcagcgcgtgattttattaggcgatgcggcacatgcaacaacgccaaatatgggacaaggcgctggtcaagcaatggaagatgctatcgtactagctaattgtttacaagcttatccatttgaagcagcattacaaagatacgataaaatccgtgtggatcataccaaaaaagtcattaagcgatctagaaaaattggcaaattagctcaaagaagcaataaaatcgttatttcattaagaaatagcatagctaaaatcatgcctaatcgtcttgttgcagcgcaaactaagtttatatacaaatcgaaaaacaaataaaaataaaacctcgaaacacagtttgactgttgtttcgaggttttttgtgattgaagtattttagttcacaataaatttaggttggtcattgttcaatttactaattgtatcattggctacgattttagacatcatatcacgtgattcaaatgtagcattacctatgtgcggagtgataacgacattatctaatgttttaagttcatcattaatctccggttcgaattcgaagacatctaaagcggcaccttcaatttctttatctttcaatgcttgtactaaagctttttcgtgaacaataggtcctcttgaagcattaattaggtaactcgttggtttcatcatttcaaattgcgctttgtcaatttggtgatgaagacttggattgtaagcagcattaattgtaacaaagtctgcattttttaataatgtttctaaatcaacatatttagcaccaatctctcgttctttatcaactttttgatgtggtccagtatataaaatgttcatgtcgaaagctttggcacgtctagcaacagcactacctatttcacctagaccgatgataccaattgtttttccagaaacttctctaccgcggaaaaatagtggcgcccatccatcaaaaccagttgttcgacataacttgtcgccttctggaattcttcttgccactgcgagtacaagtgcaaaagttaactcggctgtagaattggtagatgctttaggtgtattggtaacatcgatattttgttgtcgtgcataatcaatatcaacattattgaaacccgcaccataatttgtgatgatttttaggttgttagctgcatcaatcacttctttgtctacagaagtagacagcaagctaattaatgcgtcagcatctttaacaccttgtttaagtgtttctttatcaatgatacctgttccttcatacatatctacctcaaagccttggtctttcaataagttaagacccactttaggtattggacctgctatataaacttttaccatgtataatcacttcctttacactcaagtatagtaaaattctattgtgcaaacaaataataatattgtgaattataaaaaagtcgactttaaatagaaaaaatcgcttaataataggggtgttaaagtacattttaataaataaaaaagagtggcagttaggactaaaatataattagaccttaacttaccactctaaatagttaaaaactgtcaaattgtacaggactgagaatagtgctataccacggttgttgaaagatttaactaacgatttttaaaccgacaatagataggatgattaaagcaataaagaagattctttttgcgttttttgactcattatataaaaacatccctaccaaagtaccgccaccagtaccaatgccgctccaagtagcataagcggtgcccataggtatatcattcatagcaagcttcaaagtactgaaactacagataaatgcaactgctaatagaatgacaagccatttctttttggtgcgtgaaatttcatttaatataactacgccaacaacttctaatagtccggcgattaataaaataatccatgccattagccatcagcctcctctgtagttaatttcaaccctatgatggccataattaatatgataattaagctgatttttactaaatcgaatggatcaccaaaaaagatcatgtctacaagtactgtacctactgcaccgataccaacgaatacagcgtatacggtaccaacgggtaagtatttacaagcagatataacaagaaagaaactgataataattacaataaacgttcctgtccaactaagtaatgagtcggcagtatttaaaccagtcacccatacaatttcaatgagtccggctaagatcactttgaaccactgcatttgatgtgcctccttataatcactaaactattatattttctcaaatatttggatagagttcaatgttataagatgtgaaagcggaattgtattacaatcatattattagaaaaaatataatttttgaattgacgcatttatccgcaatactaaaataagagcccaaaacaaaatgtcccgggctcttacatcattacaatattatattttaaagtcattcaaagacttagtttaagtggatatagttgtaagaacttgcttcaccagcagaaatagtacgttcactaactgagaatggtccaccgttgtagttcatttctgaaacttctacagaaccgtcgctatttacattttcaacgtatgctacgtgaccataaccaccagcagtagattgtaaaattgaaccagcttcaggtgagttgtttacagtgtaacctgctgaagatgctgctgaagcccagttgttcgcattgccccaagttgaaccaatgtttccgcctactttatcgtatacgtaccaagtacattgaccagctgtatataagttagcacttgaacctgaagtagattgtgttgtgctttggttagttggttgtgtttgttctgctgcgtctgcttcatttccgtgatctaaacctacgattgctgcgccaatacctgctgttaaagttgttgctgttactaattttttcataattaaaaaatcctcccaaagattataaatagttatatgtgattcaattcatttgtgttgaatttgaatgttgattaattttgcggtttgctttcaacgacaagtaatactctaacagatgaagcaagctttgtgtggattgttacgcttttgtaaaacaattaaaaaaacctcacatatcgttgtaataaacgagatgtaaggttacagaatcgtatcaagtcgtaatacgaaataaaacgcgttaatataaggtttttacaaattttttgtatttcaaaaagctatcattattacagtagctataaagaatcacaaaattgtgtttagattatttaaagaatcttatagatagtggcggtaaataatcttctccattatacgcttttactgcagctacaattgtaaaaataaagttcagtattacaataattggtagtaatacaaagcctattaatatcaacatcgtgatagttccaattattgaccaaataacgtatgaaagtaagaagttgaaataatttttacctgctctatcgacaaacggtgaatcctcgcgtttaattaaccaaataattaatggtgcgattaaagaagtaaagaaacttaatacataaattaatgttgccattaatctcgcatctgaattaggctcttggtttacatttgtataagtttgttgattataatctgtttctgccatattagttaaacctcctttatcctaagacttatagatagattaactatatcaaattttgaaaaataatagtatatcgcttgagtttttcatttaattttaaatatgactgtaacgcaatgtgtatacttgttaaaatatgataatgtgatttatcgcatccttatttaactataaccggaaatttaaattgtaaaccagtgtttattaaatttccttataggctatagttgtaagtaatgactaaaatggacagtattcaaaaataaaaagaaagaaggtaaattatgaaaatagctatcgtgggttcaggtaatggtgcagtgacggctgcattagatatgattagtaagggacatgaagttaagctatattgtagaaaccaatcaatcaataaatttgataaagcatttgaacagggtggattcacttttaataatgaaggtgaagagagctttgttgaatttacggatattagtgatgatatggaatatgtccttcaggatgctgaagtgatccaaattgtgattccatcttcattcattgaacactatgcacaaacaatggcaccttttgttaaaaaagaacaacttattttctttaatattgcagcttctatgggatctattcgatttatgaatgtacttgaagatatgcatatagacgtgttacctcattttgcagaggtaaatacattaacttatggtacgcgagttaattttgaagaagcccgtgtagctttatcgctaaatgttagaaaagtacatttttcaacctatgataaagagtatttgagtgagtgtttcgataaaattgaaaaattatatccaaatatcgttaaagaagaaagtttatggaaaacaaatttagagaatggtaacccagaggtacatccgggaccaactttattaaatgttggtcgcatcgattatgcggatagttttgctttatatgaagaaggtattacgaagcatacggttagattattacatgcagttgaattagaaagactaactttagggcgtaagctaggttttgaattatctactgcaaaagaggcacgtattgaaagaggttatctagaaagacaagatgaagacgaaccattgaataggttatttaatacgagtcctgtattttcacagattaaaggcccaaatcatgtgaaaaatcgttatttaactgaagacattgcatttggattagtattgtggtctagcctagggcgtgaaattgacgttgcaacacctaatattgatgcgatcattgtgcttgcatcaacaatattagagcgtgacttttttgaagaaggtctaacaatcgatgaattaggtaaagataaactagggtttgaataatgaatcatttgacaaagggggcttgcgtatgaaaagacaaccaacatttttggaatcaatttcaacgatactagtaatgattattatcgttattacaggttttgtagtatttgatataccgatacaagcactattgatactttcatctgcttatgctgctttaatagctagaagagtaggattaaaatggcaggatttagaagaaggaataacgaagcgtttatctactgcaatgccagcattattcattatcttagcagtgggtattattgttggtacatggatgtattctggcactgttccggcattaatttattatggtctagagtttttaaatcctaactactttttagtntcagcatttattatttgcgctgttacttcagttgcgactgggacagcatggggttctgcctctactgcgggtattgcattgatggccatcgcaacacaattacatatcacacccggtatggcagctggtgcaattattgctggcgcagtattcggtgacaaaatgtcgcctttatctgatacaaccaatctggcagctttagttacgaaagtaaatatcttttctcatataagagccatgatttggacaactgtaccagcttctattataggacttgtcgtatggttctttgctggaagacaatttggaggtaatacgaacacagctcaagttaacgcgttgttaaaagagttggcacaaatatacaatattaatttctttgtatggattccattaattgtaatcattatttgtttgctgatgaaaatgtcaactgtaccagccatgctcatttcagcattaagtgccatcattgttggtgcttttaacaatggatttaaaattgtcgacggtttcaaagcaacatttgatgggtttaataaagaaatggtgtcggtgaatagtggggacttaacgaatagtgcagtgagtttaatagagcaaggcggcattatgagtatgaccgaaattatcgttaccatattttgtggttatgcatttgctggtattgtcgaaagggcaggttgtttagatgtcattttacaaaaaatatctaaaaatattaatacagtcggccaattagtgcttgcaactgttttaggtggacttatgatggtacttgctgcaggtgtagcatctgtagtgattatcatggtcggtgtattaatgatggaaatgtataataaaatgggacttgatagatctaatttatctagaacattagaggactcaggtacaatgattatacccttaattccatgggaaacatcaggtatttattatacccaacaattaggtgttacagttgatcaattctttataaggacagtaccatgttatctatgtatcgtatttgcgatattctatggatttagtggaattggaattaaaaaagcacagcccaaatgaataatgtaatacgagtgtggtaattaaaatgcaatgatttaaagcagttcgatgtcatattgtgagtcatcgagctgttttttattataaatgagtagccatatgatacttgttgtatgaaagtaataacttttaaataaagttacttaattaaaaattaatgaagggtataaaaagacagcttttaataaaacatgaacaattatttatatgaatcttaaataagaggtttaaaaatatataattaggctatacataaataaggatgagatgagtccgaattgtacatagtaatcattgtagctatattacttatatacaaagggcatcgttaatcctactaatgtagataaagattttaaatatccttctattatctattttataatcggttttgttctgtatattgtagcgatattacattatagaaccgatttattaacgcgaccatatatttaagtttctagtttagaaatcctaatttcaaatttagttaatatggattgatgattatagaaaatatagttttaatttattataaatatgatggcaattgcgtcaacataaagacttgaataaaatataatgaaaacgagagtctgggacataaatagatgtttcagactctttttcaatcctagtcattcttgaggggcaggtaggactacgaaatctttattagaagatttgatttctgttcactttatattaaaaaagtactgttgaatgtggttgagataaaaaacaatcaaagttcaaggtttaatggataacaaaaaaagacaatccatacggattgtctttttgatgacactaaaattagtgaatgtagttgtaacctgaagcttcgcttgcagagattgtacgtgaagtaacaactccagcaccttgaccatagttcatttcagaaacgttgattgaaccgtcactgtttacattttcaacgtatgctacgtggccatatccaccagcagttgattgtaagactgaacctgaagcaggtgagttgtttactgtgtaacctgaagcagcagctgcgcttgcccagttgttagcgttaccccaagttgaaccaattttaccaccaactttgtcatatacataatatgtacattgtccagctgtgtataagttgtttgaagaacctgaagtattagaaattgagtttgaaccatttgaatttgatggcgcgctagttgtacttactttaacattgctgtttgaagtagagtgagaaactgcacctttaccaccagtaccttggttattagttgtatatgattgagttgcattattgttagttgagttagcattgctgtaaccgttgctagtgtgaccttggtcactgttgcttgggttccagttaccttgccaagtgtagtggtattgaccttgttgatctatagtatatgaatagctatatgaacttgggtcatttgggttgtacccactattgttgttttctgctgcatctgcatcatgttgtgcaaaagcaaaagtagcgattcctgcagtagcgatagtagctgtagcgatttttttcattgttaaatatcctcctaagaatagtaaataatttaaaatttagttttaattttatcccagtctctaaacgacaatttttataatttttattcgctgtttcaacgacaagaattactttaccaaaaaataagtgatttgtgtgcgttgttatcattttgtaatttagttataataattaacccctttatgtaacaaataagtcgaggtgtgacataggactaaagaccgatggtatcatgttttagtataataaagtgtaaaatagcactttattatattacaaagctgtaaaataacagaaaattacaaatgggaaaatatgagactatttatatatttaaaataacaaaaaattactttgcgaccattttatgatttactaattatattaagttaaatgtaatttgtaactaaataaatgttttagttttgtttgagcaatgatattgacacttaatggagaagagattatgatattgagtataaaaattatactcgtttgagaggtgaatgaatgaaaatagaattaggtttaacttcttttgcagataatatggatttgcacacagaagtaggtactcaacctggtatatcaaatgcgcaaagaattcgtaacataatagaagaagttgaaaccgctgatcaatatggacttgatgtttatggcttaggagagcatcatagaccagattacgctgtatcagatccagttactgtgttagcagctgctgcaacaagtacacatcatattaaactgagtagtgctgtaactgtattgtcatcagatgacccagtacgtgtatatgaacgtttttctacattagatgcagtttctaatggacgtgctgaaataatggtaggtagaggttcatttatagagtcttttccattatttggttataatttgaaagattatgaacagctctttaatgagaagattgatttattaatgcacattaatcgtaatgaaattgttaattgggaaggacaaatccgaccgtctatagaaaatctaggtgtttatccaagggcagaacatcgacccctaccaattacaatagcaacaggtggtacaccagaatcttcattaaaagcaggagcgttaggtttaccaataacttatgctataattggtggtgatccaaaaaggttcaaaagaaatatagatatgtataaatctatagcagaatcttatggacatgatattaaagctttacctattgcaacacattcatggggttatattgctgaaaccgatgaacaagctaaacgtgaattcttcccatcagtaaaggcaagtcatgatatattggcaaaagaacgtggttggccaatgtatgatgaaaatagttttgaacgtgaggctgaatcacaaggtgcattgtatgttggcagtccagaaactgtagcaaataaaatcattgaaacggttgaagcattaggcattacacgttttatgttgcataccccagtgggatctattcctcatgaaagaacaatcaatacgattaaattattggctgaacgtgtaaaacctattgtagataaatattttgaaaacaaataaaaggagattttgtaatgatattacgttatttaacaaatttaaaattagctaaagaattatatggtgcggcaaaacctaaaataaaaggtgaccaatctatgaaagatacgtttgttgaagtattcaacttaccagcaaatgcagtaccattagcaggtgctgttgaagcgttaagtgcagtattctttgtattaagttttgcaagtaaaagattatcacgtcttggttcattgctaacaatcgcagtattaggtgtagcagcatataaacactttgaagcaggtcatggtaaagcaggcgctaaacatgctttagatttaactggattagcagcattaagcttcttagacacatttgactgtaagaaaaaataagttgcttcatttttgactataaagtgaaggatgtaaccatacattggtatatttagatactagaagttatttacttttttaatgaaagataagtaacctaagactgccaacaaagtctctgaccttgttggcagtttttttatgcacattttccgaaggtacggtcttagccaacagtcttcggctaatgcttttctcactggattcaatctaaattgctgtcgataggatatgaaaaataggatgcttgataaattaaaaagcgattcagtcatttagagcatcattactatgtcgctaataaattataatttgagttaagcatattgagtattacagaaaaattttttagatcgtttattgatgacacatgcatataaagaaaaatataaaaataggcaaattcactacaaatttatttgttgtttttatctatatgctaatggctatttgcgtttttaacgaaaagtaaatagcccttttttattgaaaatttttcatacaaaaacactatgcattttgtaagttagaagatttgatatttacaatggataacacattctttttttagtaataaaaagaatgaatagcttaataaaatttgaaaatgaaaagtaaatattaaaaaaatagtatgaaattttaatatttcacatagttggtcatattgaattcgttttagaaaatgggataaaattaatgtattaatattgttaagcatcactaaaacagatattaacatcatgaaaaaacataaggagtggttgtatgaattcacaaacatttaaatcattaaatgagcttatatgtacgtatcaacaggggaaaaaattttttaagttcagtaaacgagagtataaattaaattatgaagaaatatttatcttaaattatatttataattgtgaagataatgaaattactgcaaaagatattgcaaaacactcagaactacaaccgtattatttaacgaaagcattgcaaaaattaataaaaatgaatttcttaagtaaaaaaagaagtgaaatagacgaaagaacagttgtagtttatgtgaatgagcaacaacggaatagcattaatgaaatgattgaagcattacaacgctcattataatcacgatagaatccctataaaatgaaaaattttgcgtaagccataacaagactaatattttgaaaatgcaattttatattattagttatatatttcactataatatgtttttgaaaacaaattaactgtggtatacttatatttgtttaatgaaagcgcatacataaaagcgggaaaggtgttattatgaatttacttatagggattatattcttgggcatcgtgttatgcttatttacattatttacaagcaaagcaccaaatggtagtaaagcgatgggggcacttgcaaatgctgccattgcatcatttttagttgaagcatttcacaaatatgtcggcggtgatttaattgggttaccttttttaggtcaacttggtgaagcggcaggtgggcttggtggtgttgcagcagcagggttagtagcactagctatgggtgtgtctcctgtttatgcatttgttattgcagtttcatgtggcaatatggacttgttaccaggttttgttgcggcttatattgcaggttttggtatgaaatggatggaagaaaagttacctgatgggcttgatttaataacggcaatcattgtcatcgcacctattacaagattgattgcaactggtatgacgccagttgtagatgcttctttaatgcaaatcggtaatatcattaaagagtctacaacttcgagtccaatactaatgggtgtggtattaggtggtattatcacggttgtagctactgcaccattaagttcaatggcattaactgctttacttggattaactggtacacctatggctatcggagcattagcagtgtttggttcgtcattcatgaattttgtattattcaaaagaatgaagtttggtgatcgcaaaacaaccatttcagttgcaattgaacctttgtcacaagcagatatcgtaactgcaaacccagtacctgtttatattacaaattttgttggtggcgcaatatcaggcgtaatcattgcttcatttggtttggtgaatgaagcaactggaacagctacgccaattgcaggactgatggtaatgtttgggtttaacaatgcacttactgtgattacagtggcattgatgtgtgcgttaagcagtgcaatttgtggttatttagggtcactcgtatttaaaaactatccaattattacaaagtacgaattgcaaaatggtacaatgcccaaaaaagttaaacaatattataaattaaaaaaacaatgtgcagaaagcttagcataataaaacagggattgaaatcacgaaattattatagaaaaatgagacgatgccctatgggtctgtcatgattcataaaaaattgatcttctataattattgttgaaggacaaaaaaatctagtttcttcctatttaactagtaatcattcatctgtaacaagtagtagataattattgacgaaaatctagcatttgttatgtatacttataaaataaaaacgcgccggttgaatgttcgaatttcaactggcgcgttttaatataacttctggaataaaaattttatgacgcattcgtttgcatataacgtaatgagcttgtttccattttattaaatatatattctaaaatcattgctaataaccaataaaacattgcagcaacagtgtagactgttatgaaacggtatccttcattggcaataatgtgactgactgccataatttcagtgacttgaactgcaaacgctagggaagttcctttgattaacatgatgaattgattttcaatattaggtaacgcataagcaaatgcttgaggtagcacgatttctttatatatatgaaatctcgtaagccctacagattgtgcagcttctatttgttcataatcgacagattgcaatccgcttttaatagattctgaaaggtaggcaacagcatgtaatgaaaatacaataaatgcaatgattaatggagaaaaaatatcagggtttatatgccattgcaaatgttcgtttaagaataaaataaaggctggtaagccataatagacaatgaataactgaacaatcagcggtgtacttctgaaaaaagaattgtatattataatgaactgagataatacaggtatacgttttaagcgaatcattgcgaaaattaatccaatgaacagaccgatgataatggcaacaagtgaaatcatgattgtatttggcacgcctttgagtacttcaaatatagtataaaaaataaatgacataggtctgtcctccttaaatttggtatggtttttgggcacgtttatcaatgattgtaaatacgccttggataattaaagcgatgagccaataaacaacagaaatgacaatatatacttctaacatacctaaaccataattattaccaataattaatttgacttgtcccatcatgtcgatgattccgatagtaaaagccaaagaagtatcttttacaagttcgatgatttgtgttgttaaatttggaatactgttgcgcagcgcttgtggtaagatgatctcttttaatattctagggtatgttaaacctatggataaacctgcttcaatttgtcggtagtctacagattggtaacctgcgcgaataatttcagataaataagcaccagtatgtaatgtgaaagctaaaatcacaaaaaataatctactgaaatgattgatatcaatatgtacaaacaacaacaactgaggtaaagcaaaataaactaagaaaagttgtaatagtaaaggtgtgctacgaataaaagaaatatagactttgacgacaggtgacaataatttaattttttgtagtcgtatggttgctaaaataaaaccgagtatcagtgcaaaaatgagcgataaaacaatcatcaataatgtcaaaggtaactgttgcaagacttgatataataaatccaaccaatttactgattgcattagcgatgcacctccaattgtgattttttcttattaatatcatctaaatcttcaaagacattaatatcaaaatatttttttgaaagcgcttgtagtttgccttcttgcttcaattcaatcgtagcctggtcaatgtcatcatgtaattgttgatgctttttattgtaaacgatgtgtaatggttcttttttaacaataccaccgattttcacatcttctttgacttgagattgtatggctttataagtgttccaattcaaaagcatggcgtctcgacgttgctgactaaccatttttaaattatcgccattcgaaggttcttgtatcgtattgacttgaatcttatctgtatgatttttattatattcagataagatagaatacaagccaccactaggagccattggtgtaatattttttcctggtaaatcatctaaatgatgtatgtcgttgttatcacggttaacaacgagtaaaggtaaagcataactatatggctcatcttgatatagaaattgtttttcacgttcaggtgttttgaagaaccagttaattcccatatcaaactttccagcaccaatgcctactaagttggattcttcttcgcctacttcatatttgaaatcatattgtggtaattttttttcaagtaatttcatatattccatatcgagtccaataaattcgttgtttttcgtagtgtataagtagggtggattaacttctgctgacaatgcgactttaatttcctttttgtgtgatgaagtatcatcattatgagtagcattacaagcagacaataagaaacataaaacgcataacatcatgaagaaatattttttgtgtcgtagcattaaacatcacgctccgtgccaacatgatttaaaaaacgctggattctttttgactcagtgttttccaatacttcatgtggtgtaccacgatgaataatgtgtccatcatcaataaatagcacttggtcagcgattgcttttgcaaattgtatttcgtgagtaactaagaccattgtcataccttcttgggcaatcgatttgattagagagagtacgctttgtatagattctggatccaaggctgaggttggttcatcaagcagtagtacatcaggatttaaggcaagtgcacgaatgattccgatacgttgactttgcccaccagataattgactcggatatttatctttttgttctaataaatcaattctatttaaataagacagtgcgatgtcattggcttcagcatggctataatttttcccatattttaaaccgacagtaatattttctagtattgttttatttttaaaaagattataattttgaaaaaccattgcggatttttgacgtaatttgaatatatcttttttattatgtttagaagcatcaaagcttgtatccccaatagtaatagtccctgatttcgctaaagcaagtgcatttagtgtgcgtaagagtgttgttttaccagaaccactgggtccgataatagctgtgactgtacctttatcctgtgagaaactgacgtcattcagtatcgtattctcattgtatttatgtataagatgattaactgtaatcatatgtgtccccccaatatagcaataattataaattatcataataaatcttatcggtaaagtaaggatttggggtagaaacctttatttaagccatatcgagtgttaaacttatacttatatagaaagaaatataatggacgaggtggaaaaaatgaaagattctgcattaatacatacagatattcaagaaaagtggatagcaaaattgaatacagtgaaagataaatttagatcacatgcagtctataatgatcaacattctaggtttccatatgaaaatattgagtggttagtcaatgaaggttatacattattaactttacctaaagcatacggtggcgaaggtgcctcagttgaagatatggttattattcaaacctatttaggctctattgatggtgcaacggcactttcaattggctggcatttgagtgttgtgggtcaattatatgaacaaaagatgtgggacgaagacatgttaaatcaatttgcggaatctatcataaacggtgcactggttaatagagctgtaagtgaagcggaaacagggagtccaacacgaggtggtagacctgctacgaatgcaattaaaaatgaaaatggctatatattaaatggtgttaaaacattcacttctatgagtaaggggctcacgcattttattgtgagtgcatatgatgaaacgattgagcaagtaggattttatcttatagaaaaggatacaccaggcgtagaaattgcagataattggaatatggtaggaatgagagctacagaaagtcatgatttaatattaaatgatgttcaaataccagaacagaattttgtagaaattagaggcgctggtggtaaaaaaccaaacggttggattctacatatcccaagtacttatttaggcattgcgcaagcagcaagagattatgctgttgactttgctaaaacttatagccctaatagtatagaaggtacgataggagatataacaaccgttcagcaaaatattggcaaaatggaatccttgctattatctgcgcgtcactttttatggagtacagcatcattatattcaaatacccattcagataaagctatatggaatgaaacatctgcaagtaaggtgttagtcatgaatcaaggactcgaagtaattgatattgccatgcgtattgtcggtgctaagagccttgaaatggaacgtccgttacaacgttattatcgagatatgagagcaggtttacacaatccaccaatggaagatatggcatatactaatattgctaaaagtgtattagatagattttagaaaatataaagacttgagaaagtttcatttaatagttgtaattaaaatgcatttagacatagtgtctgaatgcatttttttaataacttaaaaagctaaaaatttgactttttactattgtaaaattactagagtcattatataatcaattggtactgataatcattttcaatggaggagaattatgaaaaaattattatttccgttacttgctttaatgcttattttagccgcatgtggtaataaatcagatagtgactcaaatagcgacaaaaaggaagaaacaaaatcatataaattagatagtggaaaaagtatcgatattcctaaaaatccagagcgtattgctgttgtggcgcctacatatgccggtggtattaaatatcttggtggtaagattgtggcagtaaatgaacaagtcgataacagcaaattacttaaagataaatttaaaggtgtagaaaaaattggggaaaatgatgtagaaaaggttgcaaaaacaaaacctgatttaatcgttgtttattcaacagataaaaatattaaaaaatatcaaaaaattgcacctacagttgtgtatgactatggtaaacataagtatttagatcaacaaagagaattagggaaattattaggtaaagaagatgaagtgaaatcttgggaagataaatggaaatcacaaactaaaaaagatggacaagaaataaaagataaaataggcgaagatgctactgtttcaatctttgatgaatttgataaaaaactatatagctatggtcctaactggggtcgtggtggcgaagtattatatcaagcatttggtctgaagatacctgataaactaaatgatttagttaaaaaagaaggatgggcagaagttaaacaagaaaaaattgctgattatgccggcgactatattgtttcaacaagtgaaggtaaatcaacacctgcttatgaaaaaacagacttatggaataatattccagcggtacaacaagatcatgtaattaaagttcaagctgagacatattggtacaatgatccatacacattagaatttatgagaaaagatttaaaagaaaaacttttaaacaattaaactaaattatcagtacgctaaatcaatttgattgtatgtagtaaataataagtactttaggacagaaagactcatttttaaaacattctaagattagctatgaagaaatctttacaatagattttttcatagctattttttatagtttcaaagaggaaggcgctgcatgtatatgctaagggtaaggtatagatatgtagtttttcattcatcatatgatattaaacatcaacatgttataaaatgggtgcaatatatttattttattaaaggggtttatgtggtcttatgcttgtgatgatttaatggtaaaaatactaaaaaacgcaacctaatgtaaactttttattttttaaagtttacattcgtgatataatttcttcatcgaggaggaataactatgacaacaaaaagattagtatatacagcattgatgacagcaatgatagcggtactaggctttgtgcctgcgataccattgccggtaatgccagtacccattgttttacaaaatataggtatatttctagcagcgatacttcttggacgtaaatatggtactttaagtgtcattgttttactattactagtagcaacaggtctaccattattatctggcggccgtggcggtattggtgtatttgcaggaccttcagcaggttttttatttatgtatccagtgattacatacctgattggtttagtgagagatttatattttaataaaatgaattttgttgtattattaggtacaacaattgtgttcggtgtattactgttggatattgtaggcactatcattatggggtggataacacatttaccaatatctaagtcagtaatgctttcattcgtctttatgcctggagatttattaaaagcgattattgcgagtttaataggcaatacaatgttaaaccatagtcaattcaaacaattaatgaagtaaaaacatagagggaaggtgtataaattggtcatttctatgaatgatatttttcaacaaggcacggtttatcaagatgataatagtaaaaccatttatttaacacctgaggaaccattagtatatgatacaaacaaatgggtatataagcgaatgcctacgcttaattcttggaaattagatatggcttaccaacaatttatgcataaacaacaaggatcttcccaccttgcatttacttttcctgaaaatgagaacctagatcaacaatggttggatgaaataaaagcattagaatttgagttagggattatggagctttacgctatcgaacctcagcatatccatcaagctataaactcagaaatagatgttacaatcgtgaacgatgaaacacttgaagattatatagctatttatcgtaggtttgctgaaccctatgggctagcatatgcacaagaaagtatacagatgattcgtaatcaatttccacaagaaaataaattgagaatattagcatataagggtgaactcccagtaggtatattagatttaattgtgtccgcatcggcgatggaaatagatggatttggcgtgttggatgaatatcaaaggcaaggcataggcagtgtgatgcaatcatttgtagcacagattgcgaaagacaaaacgataatattgatagctgatggtgaggatagcgcgaaagatatgtatataaagcaaggttatatctttattagctactgttatcaaatactaaaagagcatatttaaaataatatcaaacgatactattataatagtagtaaagcggagacgtagtttgttgatttatcaactaattacgtctccgctatttttatgcgttcaggatgactataaatattaaaatttccgtctctaataaaaccaatggctgtaatatttaaatcttgtgcgagtgttatggctagcgtggttggcgcggatttagaaagaataacgcccacaccgattttagcggctttaattaatatttcagaagagattctaccactaaatataagtactttattacgtactggtatatgtctttcgatacagtaaccataaagtttatccagtgcgttgtggcgtccgatatcttgacgatgttcgaaaaacgtatctccatcactaatggctgcattgtgtaaaccacctgtttgtttgaatacttcactagcgctttgtatacgtgtcatcatattcagtacttgttgaggatttaattcaatatttgacattgacgtctttgctactgctgcatcattttgaaaataaaattctctacttttaccacaacaggatgcaatcatgcgtttagtagaatactcgaagcgttctcctaaggattttgttaactcaacgtgcgcaaaccccttactatcatctatttgaatagactttaaatcatcgcttcttaatatagcaccttcagaagctaaaaaaccaagtgtaagttcttccatatgatttggactacaaataactgtagcaaattcttcaccatttaccataatagttaatggaaattcagtaacatagtgatcttttttttctatcagtttaccatcttcaaagcgtacaattgtttgatttgtcaaaacatcttcatgcatacaagcacctcatttcatattctattattattttagcttatttttagttgtaaaaaaatgattcggtttataaaggtattatcattacacgattctgtttataagttgcttttaacgattaatcagatttagttacgtcacaattgatttaacataaagtgagaagtaaacttaaggtaaacaatactaatagaggtgatacatgaatggcaagtattagggatattgcacgtcaagctgaagtaagtccaggtactgtttcacgtgttttaaacaatgatccaactttatccgttgctaaagaaacgcggacacgcatacatcaaatcgcacaagcgttacaatacgaaaaagttactagaaaaaataaacgtatccaaattattacatacgcttctcgagagaaagaaatgtcggatccatattatagagaaatccgattagcgatagaagcagaagttaaaagattaaacttatcccttaagcgcacaattagaattgatgggcaacaagatcatatcgatttaaacaaaattgaaaatgcaggcgccattattgtaattgggaatttttctgtagatgcattgaacaaattgaaaacgcacaacgctaacatggtggtcattaataatccaaatacacctaaatctattgatgctgtgtattctgatttggatgatgcaatgacagaactgcttaatcgcattttagataaaggtctaacgaaaattgcatatattggtgggcaccatacaatacgagagttgaatggtataacaactactaacgcagcagatgttagataccaagcatatcaatcatggtgtgaaaaacatgacgtcgaagaaatagtgttactcaatggatggggaaaaacacagggagaggatgcagtgaaagtttatttagaaagtgatcatgcgtttcctcaagtatttattgctggcaacgatatgattgcaatcggtattttacaacaattacaactaaataaaaaagcaatccctgaagaagtgaaattaattagttttaatgatttagaagtgattcaatatgcagtgccttctattagtagcgtgcatattcctgtcgatgaatttgggagaactgctgtcagaatggcagaagaacgtatcaataacacaaggcaaatcgcaattcatgttgttgtagaagcgcaactcaaagcaagaaacacatttaaagtatagttaactttattgacaaaacatttagtaaacaagtaaactttaattgtgtttactaaagggccgataggtatgtgagatggtttagaaaaaggagtggcaagcttatgttacaggaaatgcacaaaaagtttgaatctttatttgatgtaaaagcagatgtgagggcgtttgcaccgggacgaattaatctaattggggaacatactgattataacggtggttatgtatttccagctgcaatagaactggggacatatggtttagcatctaaaagaacggatcgtatcattcaattatattcaaataattttgaagatacaggtattgtatcttttacattagatgaacttgaatttaacgagcaacacgattgggcaaactaccctaagggtgtcgttaaatatttaaaagaagaatttaatgatatcaaccaaggattcaatattttagttgaaggaaatataccgaatggtgcgagtttatcgtcatcagcttctattgaattactaactggctggctaattaaacaattatttaatttgcatttagagcgcttacaactaattaaattaggacaagtcgttgaaaataaatttatgggtgtgaattcaggtataatggaccaatttattattggtatgggtaaagcagagcatgccatattattagacaccgctacacttgattttgactatgtacctgctaaatttggagattatgtcatctcaattatgaatacaaataaaagacgttcactaactgaaagtaaatataatgaacgtagatctgagtgtgaaaacgcactctcacaattacagcagcaattagaaatcacatctttaggtgaattatctttagcgcaatttgagaagtaccaatcacttattactgatgaggtcgtatgtagacgtgccaaacacgcgatttcagaaaatgagagaacgaagcttgcacataaagcattggctgataataactttgaacaatttgggcaattactcaatgcatcacacaaatcattaaaagaagactacgaagttacaggtattgaattagataccttagctgaaacagctcagcaagtagagggtgtattaggcgcaagaatgacaggtgctggttttgcaggatgtgccattgctttagtggataaaaatagtatacagaagttagaagatgaagtatcaaaagcatatattgataaaattggttatgcaccttcgttttatcatgtgggtataagtgatggcgtaaaggctttgtaagcaatacaaaatgattaaaagaaaggattttgaatatgtctgttttagtattaggtggcgctggatatattggtagtcatgcggtgaatcaattaataagtagaggttacgatgtcgttgttgtagataatttagggacaggtcatcgtgcagctgtaaataaagatgcacgattttatgaaggcgatatacgtgataagccatttttagatcaggtgtttacaactgaaacaatagaaggtgtcttccatttctgtgcatattcgttagtaggtgaatctgttgagaagccgttagcgtatttcaacaataatgtgaatggtttacaagtgttattagaagtcatgtatgatcatcaagtaaaacatattatcttttcctcaactgcagcagtatatggagaaccagatacagtgcctattactgaagcagattctaaaacaccgacgagtccttatggtgaaagtaagttaatgatggaaaaaatgatgcattggagtcacaatgcttacggtgttaattatgcagccttgcgttactttaatgtagcgggtgcaaaagaagagggcactataggtgaagaccaccgtccagagacgcatttagtgccaattgtattacaagttgcattgggacaaagagaagcattaactatatttggtgatgactatgatacggaagatggttcatgtattcgtgactaccttcacgttgtcgacttaatagatgcacatattttagcttaccaacatttacaaaatggtggggaatctggcgcatttaatttaggaagtagtcaagggtactcagtatttgagatattagaagcggctcgaaaggtgacaaacaaaccaattgaagcgaaggttggacctagaagagctggagaccctagtaaattagttgcatcaagtgataaagcacaatcaatacttggttggaaaccaaaacatgataatatacatgacattattgattcagcttggcgctggcataatcaacatccaaacggttatcaagaagatacggaggtataaggcatgttattaaatcaacaattagtacagcaatttgtcacacaggcaattgcatttggtgattatgaacaagaagataacatttatattcaaaatcaactgctccgaattttaaatgcaataggtattgatgttgataatgaatcaccactaaaccaagatgccactgcaaatgcgattgctcagtattggattgaacaagcagttaatgaaaactgcctagaagatgcattatataaaaaagaaatcgttgaagcacaaatattagatttaataacacctcgaccttcagttattaatcgaaattttgtagaagcctataaaaaatcaccggaaacagctactaattatttttatgaaataactaaacggaatcattatgtaaaagaagatgccattgctaataatattaattatgaagtagaaacagaatacggtgatattgaaattacaatcaatttatctaaacctgaaaaagatgcaaagcaaattgcgaaagctaaagctgaaccagctaaacattatcctaaatgtgcactatgtattgaaaatgaaggctaccaaggctcggttacacaagcagctcgtacgaatcatcgtattatacgattgaaattagacggaaagtcgtggggattccaatattcaccatatgcttattttccagagcatagcattgtgttatctgaacaccatgtgcctatggaaattaataaacaaacatttgttaatttgttagcgtttattgaacaatttccacattattttattggatctaatgcagacattccattagttggtggatcgattttatcacataatcattatcaggccggcaaacatgtatttcctatggataatgcggcagaaatagagcggtttacaatgaatcaattttcatcggtaacagcgagtacgttgaattggccaatgagtgtgattcgattaaaaagcgaaaatcgcgatgaactcattaatgcagcaacatatgtcatgaatacgtggaatcaatactcagatgaaacgatagatgtaagggcatttagtaaagatggtgaaagacatcatactgtaacaccgattgcacgttatagacaatcacaatatgaattagatattgttttaagagataatcaaacttccgaagcatttccagatgggatattccatccacatgaggatgtacaacatattaaaaaagagaacatcggtttaatagaagtgatgggtacggcgatattaccagggcgcttaaaagaggaattacaacaagtaaaaacgtatcttgtgggtgataaccaatttgatttaggtatacaccagcaatgggctgaaaatatgaagcgcacttatgatatcaataaacaaaatgttgacgacatcgttgataaagaagtcggttataaatttaaacgtgtgttagaagatgcaggtgtttttaaaaacaccgatactggacgccaagcatttaaacgctttatcaaacatttataataaaagcagcgcatgtcgaattgaataggctatgtttaaaaacgcgctatattttatgacatgttataaactgaaaatatttttatctcaaggcggagtgaagaaatcaaactggactcattgatttcttcactccgctcttttattttcttgattacaagcatataataaaatgaaaaaggatgattattttgaaaattagatttaaatatttaattatttcattgattgctttatgccttatgttagcaggatgttcaaacggtgataataaggatgatagtaaaacgaaaagcgatgaaaaagctaagcaagaattgcatgtttctgcagcagcaagtctaacggatgtcactaaggacttagaaaaagcttttaaaaaagatcataaagatgtagacgtttcttttaattatggtggttcaggtgctttaagacaacaaatagaaaaaggtgcaccagtagatgtatttatgtctgcaaatacgaaagatgtggatgggctagttgataaagacaaagcgcaaaatacatatgagtatgctaaaaatcaattagtattaattggtgaaaaagatagtaactatcattcagtggctgatatacaaggcgatgataagctagccatcggtgaagcgaaatcagtacctgcaggtaaatatgctgagcaatatttaaaagataatcatttattcgataaagtgaaaccaaatttagtttatgccaaagatgtgcgtcaagtattaaactatgttgaaaaaggtaatgcacaattaggttatgtgtataaaacagatttatatcaatcacaacaaaatggtagtagtaaagtgaaagaaatcaatacagccgatttgaaaaaaccaattacttataaagcagctactacaacggataaaaagttagcgaaagaatggatagatttcttaaaaacagataaggccaaagatattttgaaaaaatatcaatttgatgcataggaggatttagcaatgccagatattacaccattttggatatcacttaaagtagccgttataagtactatcatagtaactttaattggcgtactcatttcaaaatggttatatagacgtcgtggtatcattgctagaatcttagaaagtatcatagtcttacctattgttttaccgccgactgtgatggggttcatcttgctcattgtgttttcaccaagaagctatattggggcattttttgctaatgtattacacttacccgtagtgtttacattgactggtgcagtcattgcctctgtgatcgtcagttttccattgatgtaccaacatactgtacaaggcttccgcagtatagatcataagatgctaaatacagctaggacaatgggagccagtgaaagtaaaatattttttaaattaattttaccgctatctaaacgggcaatcttatctggggtaatgatgagctttgcgagagcaatcggtgaatttggcgctacgcttatggtggctggctatattccaaacaagacgaatacattacctttagagatttatttcttggttgaacaaggtaaggaaaatcaagcatggttatgggtaattgtattggtagcatttgcgataactgttataggtacaattaatttgttaaataaagatcgttatcgggaggttgattaattgttacatatacatctgaaacatcagcttaaagcaacaccattaaacatacaaattaatgatgataaaccaaagatatatgcaattaaaggaccatccggtattggcaagacgacaatattgaatatgatagcgggtttaagacaacctgacagcgcatttatacaattgaataaacgtattatttcagattcagcgcatgcgatttatgagaaaattcaaaaaagaaatattggctatcttttccaagattaccaactttttcctaacatgaatgtctatcaaaatattactttcatggcacaaccttctgatcatattgataaattgatgaaacaactaaatattgatcacctaaaagatcaatatcctatgcgtttatcaggtggagaagcacaacgcgtggctttagctagaacactgagtacaaagccagacttgattctgttagatgaaccattttcaagtctagacgattcgactaagcatgaaagtatccaacttgtgcaacgtatatttgaaaagtggcaaattcctattatctttgttacacattcaaattatgaggccacctcactagcgcatgaaatcatcactattggctaaaatcattttccaaatataaacttcaatacttaaaaacctgtatgacatagataatagttatacaggtttttttaaaagtataagacaaatatctataatatgaatgtattttttgatcaatttaaatgataataagcatcattttattttagaaggggtgtatatatgaagatagaatttttaggaacagcaggtgggtttccgtcactttataagtcccattcgcaacattcacaagcaatacatagaactggaccagctatttatatacatgacctccaattattaattgatacttctgaggatatattttatcaattacgccgttcagaaatttatgatataaaatatggcatatattcgcattggcatcctgatcatacgatgggtataagaatttgggaaacattaaattttgattttataaataaagtaccacaatccaaaaaatcgaaaataatccttacagagcaacatgtaaatgattttaaaaaatattttggtcattgggatcatttaaactatctaggcgatttaggtgtaattgaaaaagagattattcctaacaatggtcaaataaagataggtgaaacgactatagagtggattcagctagcagaagacattgcatttggattttatattacgacatccacattacgcattttaattatcccggatgaaattaaaggttatcacccaatagaaaaattgaagaacgttgatgttgcgattttaccatttggtagtaatgaagttaatccagttaccgaagaacgaattcacgaaaatggtatgctagcagcgttaggtgaaattacttttcaagaaagtgtgactatcgcgcgtgaaatcaatgcaacacacacttactttacacacatagaagcaacggaaaacttaaatgaaacacacattgaacaattagaacagcaattaaaagaggaaggattgttgactaccattgcttacgatggtttacaaattacaatagaataaatatggcaacaaccattaataaagtacccttcaaagccgacacaacaaagtgaaatggagaagggtacttttttagttaaatattgatcagctttgtgaagcgctagtttgatttggaataggaaaataatcaaaaatttctccggaatgtagtgcttcggaaagtgtagatagccaagcgtaatagactttggaatgttcaatttgttctaacattttattggcatcttcaatccattctggttctgcatcttcagaatcaataatagggaagagtaatttttctgctcgttgaatggcttctaaatttaatttgatttcacgattccgtttttgcgagaaaaaattaccgaaaaacgtaaagaaatctttttctgctgtaaagtgttgttttctgctacctctaataaattgttgctttacacgatcaaattcttgtagtcgtttaacaccggcactcatacttggtttactcatttgtaactcataacgcatttcatctaatgtcatgcttttttgttcgaaaaccatcgtgccataaagattacctacactccgattgacaccgtaaagatccattgtttctccaatagagttaattacgatatctttcgcttcttctaatagttgttcaaagttttttgatcgcgccatgaattcacctcaaaataatatttgattcattgtaccatgaagttaagataataggatatgttcagaatgttgaaaatacttgtctatattaatgaaagataaaataaaaacacgcattagagctgaataaagataagggcaaacactactttataacaatattaattttaaaccgttgttacattggagaccaagatttataatagaaataatgatgtgaagagagggttattcgtgtgacacaggatcgatattcaagacaaatgttatttaaacatattggatcagacggacaggataaaattaagagacagcatgtacttattgttggtatgggtgctttaggtacacatcttgcagagggtttagtgcgctctggcataggtgaacttacgattgtggatagagattatattgaatacagtaatcttcaaaggcaaacattattttcagaagcggatgcagatgcagcattgcctaaggtcattgctgcagaaacaaaattattagcaattcgtaaagatgtcgtcatacacagtcatatcgcacatgttgatcgtcaatttttagaagcgcatgctacaaatatttctttgattttagatgctacagataattttgaaacgcggcaattaattaatgactatgcgtatcaacagaatataccgtggatttatggtggtgtagtgcaaagtacttatatagaagctgcatttatacctggcacaacaccgtgctttaattgcatggtaccacaattgccaaccatcaatatgacgtgtgatacggtaggtgttatacaacccgctgtaacgatgacgacaagtttacaaatacgcgatgcattgaaactattgatagaacatacgcctgatactaaattgacttatggtgatttatgggaaggtacacattttagctttggatttagtaaattatatagaacaaattgtccaacttgtggtcaaaatccaacatatccccatttaaatgaaaccaaacgtcagtatgttagtttgtgtggaagagatacggtgcaatatgaaaaccctaatatttcccaggaaatgctaggtgtatttttaaatcaacacaaaatcgcatttaaacgtaacccttatatcattcaatttcaatataaaggttatcgtatcgtcagttttaaaggtggacgtatgctgatacatggcatgaagcaaccacaagaagcaattaaattaataaatcaattatttggataaatgaggtgggcatcgtgcatacaaatgtgcaattagacaaagatataaaatgtgctattttaaccgtttctgatacaagagattatgaaacggataagggggggcaattggctcaatcactactttcagaattgaatgtaagtattgctagtgagcattatcgaattgttaaagatgaacaagacttaattcaaaaacaattacgagaatggttaaaggaagatatagatgtcattattacaactggtggtacagggattgctcagagggacgttacaatagaagctgtatcagcactaatcacaaaagaaattgagggttttggtgaattatttagatatttgagttataccgaagacgttggaacacgtgcacttttatcaagagcgattgcaggtgcagttggagataagttgatatttagtattcctggttcaacaggcgctgttaaattagcgttgaacaagttgataaaaccagaattaaatcacctagtgaaagaaataactaaataataaaagcgccaagtgtaacttgaattctgatttatttaacagaattgcgacacttcgcgcttagtttatatagttgctgctaaaaaatgatggtcatgacttcagtttactttgggtaattcaaggagtcactatctttaattatcttggcgctgatagtggcctgatttcccacctgatttggataacagataggtttcaccgattaccatacttttatctaatgcttttgtcatgtcatatacggtaagggcaacagcagtagcagcggttagtgcttccatttcaacgccagttttacctgtagtagagacaatcgtctgtatattaagtgtgtatgattgttcattttcttgccaatcaaatgttacatctatgccagttagtggtaattggtgacacataggaataatatctgcagtatttttagcggccataatacccgcaatttgagcagtatttaaaacattccctttttgatttgtattttcgacaatttgtttataaatttccgagttaactgtgatacttgaatgtgcaattgcagtacgtttagaaatgtttttttctgaaacatctaccattttagcattgccttggtgatttatatgcgtaaattcagacaaaatatccctcctaatcgtttcttagtatatcacgaaattaatttatgtaaggagtagatttaaaatgccagtagaaaaaagaacgccaattcctgtaagtgaagcaattgaacgtgtagtcaatcaatcgatttatacgcaacaagtagaagttccattaaatgagagtatccatcatattttagccgaagatatcattgcgacatatgaaattccacggtttaataaatctccctatgatggctttgctattcgcagtaaggatacggtaggtgctagtggtgaacaacgtgtaagctttaatgtgattgatcatattggagcaggatctgtttctgataaaacggtaggcgctttcgaggcggttcggattatgacaggggctgctctaccagaaggtgcagatgcagtggttatgttagaacaaactgttgaaaacggacatagttttactttgagaaaaacctttgagccaaatgaaaatgtttctttaaagggtgaggaaacagagataggagatatcgtactggaaaaggggcaattaattaattccggtgccattgctgtattagcaacttacggttatacacaagtaaaagtaaataaaaagccaagtgtaggtgttatagctactggtagtgagttattggatgtgaatgatgctttagaaccaggaaaaattaggaattcaaatggtcctatgattacagccttatcgcaaaaattagggttaagtgctattgcatatcaaattcaagaagatgatttggacagtagtattcaagtcgtaaaagaagcaatggctaaacatgatattgtcattacgactggtggcgtgtcggtgggtgatttcgattatctgccacaaatatatgaagcattaaacgcagaagtactattcaataaaatagcgatgcgaccaggtagtgttacgactgtagcagttgcaaatgaaacctatctatttggattatctgggaatccatcggcttgctatactggttttgagttatatgttaaaccggcagcacttcatatgatgggtgctaatgcaatatatcctcaagtaatacaagcgacattaatggaagattttaaaaaggcgaacccattcacaagatttatacgtgccacagcgacgttgaatggaaaagaaatgacggtagtaccatcagggtttaataaatcaggcgctgtagttgcgatagcccatagtaatgctatgattatgcttccaggtggaacgagaggttatagtcaaggacatacggttaacgtcatattgacggaatcacaagcatacgaaaagacatgttttatatgattctacaaattgtgggttataaaaacgctggaaaaacgacgttaatgtcacatacaatccaatttttaaaatcacatttgttaacagtggcaactgttaaacatcacggatttaaccaattagttaatcaagaagcggatatcacattacaaaatgatcaagttgaccatatgaaacattttaatgcaggtgctgatcaaagtattgtacaaggtaagtcttatcaacagtcggtaacaagaaaagaaaatcaaagtcttgaggaaatcatcagcgaatctgttacaatagattgtaacgtgatactcgtagaaggctttaaatctgcaccatttgataaagtagttgtttatcaagatgagaaagaacgtcaaagtctaagccatctaacgaatgtaaaatactatgtgaatttggccgatacagatgcattgacgctttataatcaatggctatttcattattttaaaatagaaggaatgcattaaatgaagcaattcgaagtgaagtgtgacccgatacaaactgagccatatagagattatgtcctagatgaaaatcaaggcgcggtagttgtttttacaggtcatgtaagagagtggacgaaaggtgttaaaacagaatacttagaatatgaagcatatattcctatggctgagaagaaactcgctcaaattggagacgaaatatcacagaaatggcctggaacaaaaacagcaattgttcatagaattggaccactgaatatatctgatattgctgtaattatcagtgtttcctcgccacatcgaaaggatgcatatcgcgcaaatgaatatgctattgaacgaatcaaagcaatcgtgcctatatggaaaaaggaaatatgggaagatggcgctcaatggcaagggcatcaacatgggaatcacaatgatgcggttgagggggaatagtaattatgaaaatactatactttgcagaattaaaagaaattttagctaaacagactgaaacaattgatttaagttatgatattacggtagatgattttactaaagatttatttgaacgttatcctcaaatcaaggataagcaatttcaaattgcagtaaatgaagaattcgtcaaaagtgatgacatcgtacatcaagatgatacagtggcattaattccaccagttagcggagggtaaaaagacatgaaagcaattatacttgccggaggacaatcagaaagattcggcgaaccaaaggcttttgctcaaataaatgcgcaaccattttataagcgtattattgacgttttagagggtacaaatatgtttaatcaaattattatcagtacaaatgagacattagcatctcaatttgatcattctgatattattattgatgaagatcaaaataaggataaaggtcctttggcaggtattcagtcagtcattcagcattatgaaagtgaggaactgttctttgttgtgtcggttgatacacctatgatttctcaaaaagctgtgagtaaactatatcaattcatggtagaacaccttatagaagaccaattagatatcgctgggtttaaggaaaagggcagacccataccgactattgctttttatagtccgcacacattgccatatattgatgatgcattaaattcaaacgattatagtttgaaaagtgtttataataaagtgaaaagtgattggttagatgtaaatttaattgaatcaccagattattggtacaaaaatattaattatcaacaagatttggactctttacaacaagatatattaaatagataaggggacctaatgttatggtagagcaaataactgataaacttggacgtccgattcgtgatttaagactgtcagttacagatcgttgcaatttccgttgtgattattgcatgccgaaagaaatatttggtgatgactttgtattcttacctaaagatgagttgcttacctttgatgaaatggtacgtattgcacaggtatacacgcaattaggtgtgaaaaaaataagaattacaggtggggaaccattactaagacgtgatttagataaattgatataccagttaaatcaattagaaggtgtagaagatattggtttaacgacaaatggtttattattaaaaaaacacggtcaaaaattatacgatgctggcttgagacgtatcaatgtcagcctagatgcaatagacgatgctgtgttccaagccataaacaatagaaatattaaggcttctacgattttacaacaaattgattatgcagttgctataggatttcaagtgaaagtaaatgtagtggtacaaaaaggtgtaaatgatgaccagatcgtacctatggtgcaatactttaaaaataaagatgtacaaattcgatttattgaatttatggacgttggtaatgataatggttgggactttagtaaagttgtgtcaaaagacgaaatgcttgaaatgatagagcagaattttgatattgagccagtggcaccgaaatattatggtgaagttgcaaaatattatcagcataaagataataaagcacaatttggtttgataacaagtgtttctcagtcattctgttctacttgtacacgtgcacgtctttcatcagatggtaagttttatggatgtttatttagtactgtagatggatttaatgttaagtcatttatgcgcaatggcgcaactgataatgaattattcgaacaatttaaagcattatggaatatcagagatgaccgctattctgatgaacgaactgaacaaacagttgcaaatagaaaacgtaaaaaaataaacatgaattatataggtggataataaaaaatgaaatgagtctgggacaaaatagatgtctcagatttttttcatttaggcagtagatgactgaattgaaaatggaaagatgcctatttttaattgccttttaataaatttcaaggtcaaaatgataggatgcttaacctttaatgatatttaatttcgcaaaatataaaatagataaaatttgttaatttatgtctaaagatattgagtaatacaaattttttaagatgttcatttgagattatataaattatattcaattgaagataatatttatctgtttcaataaaaataatagattaaatgaagaaagtgttatataatacttttgaagcttattcattaaataaagccatagaacacaacgagagtagtcaataaggaggccattttttatggaaagtaaagtatcatattttataaattctgaaagagcattaagtcaattaaagcattggttaaaatctgtacatcgcttatcaatagaagaatttgtcatattgtataaagtgtatgaagcaaagaaaatgagcggtaaagagttaagagataccttgcattttgaaatgctttgggatacgagtaaaattgacgttattattagaaaaatttataaaaaagagctcatttctaaagtgcgttcagaaacggatgaaagacaagttttttattattataatgatatacagagtaaattattagatgatattatcaatgaaattgaaaaaattcaaatagcacaatagtgtgatatacataaattaaaacaatcagataggattacaatcaaatatccataaaagttctgtaggtttatattcgataaggaatggctaggagtggattaccttaactgatccagaaaatctactaacttaatatcgtaggggaatatactttatagttatttactgtcgaactaaaaagagtctgagacatcaagcggtgtctcagactctaattttttaattaaaatgaacttaaatttttaacttttctgccgtgtacaaagtagtaaatgatcgctgtgattaaaacgatgattgccattattgcataaagttgtgcgtagctcacagctgatgtaaagaaccctaatacataaggtccaaatcctaaacctaaatcaagaccaataaagtaagtagaagtcgcaataccatatttagctggcggtgagactttaatcgcaatggcttgcatacaagatgaaatattgccgtaaccagcacctaagcataaaccagcaattaggagtaaccaaccattgtttgtaatacttaaagtaaggaaagtaatgattaagaatatgaatgctggataagctactacattttcgtttttttgatccattaatcgaccagcaactgggcgtgtaataagtgaagcaattgcatagaatataaagaagtaacttgatattgttacaagattaatttcttgggcaaaaaattgtagaaatgtaagaattgatgaataggttaaaccggaaatcaacatgataattgcaacgggtacagcctcttttgcaatataattgttaatattgaattttttagattgagtcgtttgctttttagactctgtgttactttctacttcaaattgtaatttaataaagaaagaaataataaagctgataatgccacagagtaagcagattgtgaataataatttaatagggaagctattgattagtaataaaccgaagaatggtccgattgctgcacctatgaccaaacttaaggagaataagctaatgccttcactctttctgtcatttggtgtgacataagctgcaattgttcctgtagcagttgtagtaatacctgtagcaataccattaacgagtctagttaccattaagaaagctaaagaaccttctataaaataaaataattgtgtaactaataaaaagcctaaaccaatgagtaatatacgtttaggcccaattttattaacatatttaccagtcgtaaatctacctattaatgagccgataataaatagccctgtaactagtccagcaacactatctgaggcgtggtactctgattttgtataactagcaataataacaatcagtagatacatacatagattaattaaaaaattagtaaaaaagttaatgttaaaactttttgtccaaatcggtgatttcagagaagtggattgattcatttgactattcctccatattgataatttgttcatggatcttttgaatgacttgtattgcatagttaagttcatcatctgataaaccagtattttcaataattttatcctgtacatcacatatacgtgtattgatcgcaccataaagttgctgtcctttttcagaaaaagataataatttttctcttttatcttctccaggttcaatcgtaagtaatgatttatcagaaagtacttttaaaatctttcttgtagttggtttttcaattgctcgacgctttgaaatttgaacgagtgtcgttggtgcgttttgagcaatatcttttaataccaaccattgtgcgggataaacatcaaattcctcaaataccggttggaaaaatttagtgtagggtctataaatagctgttagatgattgaatatactttgtgagtccataagatcctccttaatggttagctaggctaacctatttaacaacaaacaatattataaacctttttgtaggataaagcaatagtattttatttttaaaatcaagttataacctgtttgatgttaaaaagacttaagcgaacataaaaaatcatgcattgataataaatgaagaaatagtgattgaaatgagggcgaactggtgggaatttcagaaaatttgtcatttctcacatttgtaattgagtcaatgtataaatagttgaggaaaagtgacaataagcgccgacatttggtgagtttaatatgaaagaaagttgtatggatgtgttatgagaagtaaagtcgtatgcaatttgttatgatgaagctaaaggaagcttaggggagagaaattaatgcaatatttgaaattagatcatattatccattatattcatcagttagagaactttaaatttccaggtcatttattaactttgaaccaaggtggacaacatgagcgttttggtacatttaatagattagcttatttagaaaatgcttacgtagaattgttggatgtttataaaccggaagttttgcaaaaaatagtgaaatcggatgaagggcgtgtatcattcccatctaaaattgtgcaagaccaatatagtcaaggaatgaagacattagctttaagtacggctgacatcaatcaacttaaggaagatttagaagaaaaaggtatagatgttatcggtccgattgaaatgcacagagaaaacattaaaggtgataaaacatcctggaaattattatatattgcagatccagactatagagtgaagccaccgttctttatacagtgggatgagaacgagcaaaaaaggaatgaaaaattagaagcacttcgccaaaaagaatttatgattaaatccattaatttgcatagtaccgaacgcgcacatactgtgaaaaaatggcaacattggtttgatatggacatagttagtgaagatgagaaagtcacaatacttaaattaaaacatgatgatttgatatttaaaataagtgatggtcctaactcaggatataaatcaataacaattaaagatagtaaaacgatttctccatatactttaattataagagggttaagttatatatttgaggcagattaataaatgtaaatataagcactatgagcgataatgaatatgtgtatcaatgaaataataagtgttaaaatagttaaataagtggaaaacttattagtacgcaataacagtaagtaaatagatataacaaaagttaatgctgctaaaataattcttagacttaaatatgaaattgtcagtggttcaataaaagcttgaataacgaaaactaaattaataattaaaaacaatccaataataatactacgcatagttacacctcatttctaaatttattatagtatatcaaatgagtgaattctatgtgaaagtttgctaaaagcattgtataataccaaagtattgaattgataaaggagacatcagtttttatggaaaaaatgaatattacagatcaagcacatgatgcatttgttaaagcacacccacaaggtgacttattacaattaacgcagtgggcagaaactaaaacattaactggatggtactcaagacgtatcgcagttggagaagacgatgaaattgtaggggtagcgcaactactatttaaaaaagtacctaaactaccttatacactgtgctatatttcaagaggatttgtaacagattatagtaacaagttggcattagaaactttacttgaagctgcaatgcaaattgccaaagaagaaaaagcatatgctattaaaattgatccagatgttgaagtagataaaggtgcagacgctttgtctaatttaagagcgcttgggtttaaacataaagggtttaaagagggcttatctaaagattatattcaaccaagaatgactatgattacaccaatagaaaaaacggatgtagcattaattcaaagttttgaacgtagaaatcgttcaaaagtgagattagctttaaaacgtggtactacagttgaacgttcaaatagagaaggtttgaaaacatttgctaatttaatgcaaataacaggcgaaagagatggttttttaactagagatattagttattttgaaaatatatatgatgcattacaccctgatggggatgctgagttgtttttagtgaagttagaacctaaacctgttttagaagatttaagacaagaattgcatgaactagaagatgaaaaagcaaaacttgcagataaaaagcaggataagaagacacttaataaaataaatgatgctgataataaaatagccaaaactcaagaactcattgatgaaatggttactttagaatcaacgcatccagaaggcatttatttatcaggtgctttattaatgtttgctggtaaaaaatcttactacttatatggggcttcatcaaatgagtatcgtaacttcttaccaaaccaccatatgcaatttgctatgatgcaatatgcaagagaacatggtgcaacgtcatacgactttggtggaactgataataatcctgataaagattcagaccattatggtttatggacatttaaaaaagtttggggcacatatttaagtgaaaaaattggtgaattcgactatgtgttaaatgcacctttatatcaaattatcgagaatattaaaccaaaacttacaaaagccaaaattaaactgtctcgaaaattaaaaaaataaagcatttcagaataaatagacgcgtgctatatagagttagaatacattgattcaactttatagcacgcattttttatgattgccatggaataatgatacatatagtgatgttgaaatttaaaagttcaactaaatgtcacaggacaaattgtctataattaacaaactacatattttcaggaccatacttgtggtaaattagaactgttaaagggatatgtgagaggagaaaaatacatgataaaaaaattgttgcagttttcattaggaaataaatttgcaatatttttaatggttttgttagttatattgggcggtgtttatgccagtagcaaaatgaaattagaattattacctgacgttgagccaccaatgattaccgtacaaacctccatgccaggtgctacaccagaaacagtaaaagaagatgtaagtgataagattgatgatcaaattagatcgatggcaggtgttaagaatgttaatgctcaatctatacagaatgcatcaatggttacggttgaatataatgaaggtactaatttagataaagcagagaacgacctcaaaaaagagttagataaaataaaatttggggagaatgttgaagagccggagttaacaagaagctctatggatgcttttccaatagttgcttattcatttactaccaatgataatgatttaaaagatacaacacgaaaaattaataatcagttattaccaaaacttcaaacaattgatggggtccaaaatgcgcaacttaatgggcagacgtcacgagaagtatcaataaaatttgaccaagataaattagaagcaagtgggttaactaaagagcgtgttcaacagtatttgaaaagtgctacaagtgaaacaccattaggcctatttcaatttaatgatactgagaaatctgtcgttattgatggtcaatttacatccgttaaagcacttgaaaatttagacattccgttatctgcagcagcaggagatagtcaatctcaaggtgatgacggagcgtcaagtcaaggtgctgagcaacaagcttctgcttcccaatctgcaactacagcatcgagtagccaatcaagtgattctgaagtaccatccgtaaaattaaaagaaattgcacaagtatctgcaggcgatgagcgggcatctatatctaaaacaaacggtaaagatgcagttaatgttcaaattacaaaagcacaagatgcaaacactgttcaagttgccaaagatacaaaaaaagaaattgatcaatttataaaagacaatccgaaaatggttgctacaaaagtgatggatacagcaaaaccaatagaagatgcattgtatacaatgattgagaaagctgcactaggtaccattgtagcgattatcgtaattctattatttttaagaaatatcagaacgactgccatttcaattgtatctatacccatgtccattttaattgcaatggttgcgttgaaattatcagatgtttcattgaatattttaacgttaggagcattaactgttgcgataggtcgtgttattgatgattctatcgttgttgttgaaaatatttaccgacgattatctgataaatcagaagcacttaaaggtgatcaactcattgtaagtgctacaagcgaagtatttaaaccaatcatgtcatcgacgattgttacaattgtcgtgttcttgccattagcttttgtaagtggctctgtaggagaaatgtttagaccatttgcactggcaatcgcgtttagtttactagcttcattacttgtatctattacgattgttcctgcattaagtgctactttctttaaaaaaggtgtaatacagcataaacaggaaacatcattaggatttatcggtagaaagtataaatccgttttgaactggtcattaaatcataaatggatagtcattattgtcagtacaattatattaattgcaagtattggacttggggctgccaaactaggaactagctttatttctacgggtgaagataaatatatggcattaacttatacgcctaaaccaggagaaacgcaaaaaggggtattagaccatgcagagcaagtacaaaaatatctgaatagtaaagataaagtgcgtacagttcaatattcagttggcggtccaacacctaatgatccaactggtaactctaatagtatggcgattatggttgagtacgattcgaacacacctcattttgatgaagaacccgataaggtgttacatcatattgaaacatacaaacatcctggtgagtggtcaaatcaagatatgggtactggtggcagtaataatgctttagaaattactgttagtggtccatcattagaatcaattaaaggtacagtgaagaaagttgaagatgaaataaaagatgtcagtgggactgcaaatgttaaatcagatttaacacaaacctatgatcaatataatattaaaatagatcagaataaggcagcaagttatggattatctgcttcacagttagcaatgaccttgaatcagaatacacctgaggaaagtgtgacaactgttaaagaaaaagggaagtccatagatgttaaaattaaggaagataagcaaacagattggtcaaaagataagttagaaaacacagagttgcaatctcccacaggtcagtctgtggaattaagtgatattgctgagttagaagaatcgacaacgccaaacaaaattgaaacgaaggctggagatgaaatcgcaaccgtttcagctaaaattacaaatgatgacgtaggtggtgcatcacagaaaataatgtcgaaagtaaatcatatcgatacaccaagcaatgtaaaagttaacgttggtggtgcaaatgaagatattagcaatgccataacacaattagcgatggctatgttagcagctattatcattgtatatctagtgcttgtattgacatttaaaggcgcactggcacctttcacaattctattttcattaccatataccattataggtgtagtagtggctttagttataacgggagagacaatatcggtaccaagtatgataggtatgttaatgctgattgggatcgtagtaacgaacgcgattgtattgattgatagagtgattaataaggaaaaacaagggcttgaaatgaaagcagcgttattagaagcgggtggcacgcgtatcagaccaattttaatgacggcacttgctacaatcggtgctctagccccaatgctatttggtgaagatagttcaatcattatttcaaaaggtatggctgcaacggttgtaggtggattaatttcatctacattgctaacattgattgttgttccggttatatatgaaatattgtttacccttaaacgtaaaatagagaatcgacaaaaacataataaataaaaaaaataggggagtgggacagaaatcaaattttttaatagagatttcgtagtcccacctatgcaatcaaggcaaggatgactaggattgaaatgtttatctgagctaaagccgatgcataagtctcctagaattttatgcagaatacataagctttggcttatgcataagaactactgattttcataaattgaaaaagtagttctttaaaccagtgagactttacatttcaattcagtcatcaactgcctaaacgaaaaagagtctgagacaactatttatgtcccagactcttttaattaaacagcgtatagctaaaatatttttgagtatcagaattaccaattaatataaaactaatgttaaaatagcatagattataaataatataatactgatgatatttaagatttgaaccgctttttggtctttcttactatgtttgaaagcagtgatttcaacattaccaactaataataacaatatgatgaaaacccaccaattaattgcagggaatgataatgtcgtaattgcaacaacaaataataagagcaaggccattataatacgcaaaatacgcgtgataatcgtatccattctaaatatgcttatgtaacacacgattagatagagtactggtaaaaagataagatagagtagcatattgttacatcctttctatgttcacctttaatcttagcatgtaaaaaaaatatttactaggatgttatttatgttctttttgactaatttctgaacgtacagatgcaatttctttttctatttcttcaagttgctttactaaaggatcgacttgttgattaacagattctcttttttctaagtcaccttgtaatcgaacataatcatattttagttcagctaatttttcattcaaatccattagcgtacactcctttgcgggtagaaaacgcctacaccagtttgaattgaattataacatgaaattgaaagcttctaaaataaccattttatatgttaaggtatgaaaatagaatgaaaacgaaataacttagtgaaagaaggattattgtgacacaacaatttatcataattattttactcattgcattaggttatacgcttaaaagaatcaattactttaaagcaaatgatagccaagtactgtcgacattagtattaaatgtcacgttgccttctttagttatcgtgaatttgaatgaagctaaattggatgtctcgttatctattttacctattatgatgattttatatggtgtcattacaaaagtaataattgtatggttctttataaaatatgataatcaaattcgtggtgcaacaggtatgatgatggcttctttaaatattggcttatttgcttaccctctggttgaggcgatttggccagaaactggtatgatttattttggtatggccgatattggtggcgcaatcattatgtttggtgtgacttattttgtaggaagctattttagcagtggtggagacagttttgattttaaatatttaggaaaaaatttattgaagtctgtaccacttatgacatatattattatgtttattttaaatatgatgaatattcattttccagacccagtcattgatttcttttctgtgttatcaggtgcaaatatgccattatcaatgatacttctagggttaatgttgaattttagtatagataaacgctttttaccaattgctattaagtatttagtagcgcattatggtcttggtatcattgctggcttacttgttcactttttcttgccagtgaatgatgaaatgataaagactacattacaagtagcatggctcttaccagtaggtgtagcgattataccttattcaattcagtttaaatataaaacattgcctctagtagggatggttactaatttaacaatcgtgattagtattattatcttgtatatttatcagatgttgtttgtttaaagtgctctaaaatttaataataaaaagaaacacgatcaatataaaacgattattggtcgtgttttgtttcttaataagtattaatttatacaattaatatatagataaataaaaagacagaaagcgaacgctatcatgcgctttctgtcttttgttggtagcaatgagattagcctttaccacccataaatgcaggatagtttgtcataccaccatcaacatatattgttgtaccgtgaatatagtctgctaaatctgaagcaaggaatcttgcaacattagccacttgttgtgcgtcgccaataactttggctggaatcatttcaagtgtttctgcacgcgtttgcggatctgagaatttttcttttgtatgttctgttacgatagcaccaggagatatattgttaatgcgaatgccatactgtgcatattccattgacattgtttccatcattaattttaaaccgcctttacttgcagcataattcacatagtttggccatggaattttatcgtgaacacttgatgtattaatgataatacctggtttatcttcttttaaaaattgattaacagcggccttagcacctatgaatgcaccggttaaattaatatcaatgactttttgccactcatctaagggcatttcgtgcgtaggaattggtttttcaaaaccagcattgttaatcatgatatctaaagtaccaaatgtatcaactgcagttttgactaattgttcgacgtctgcctctttagaaacatcagcatatgctttaatcgctttaccaccagcgtcttctattagttttatagattcggcaacagcatctaagctactttctgaacgatagttaatgacaacatttgctttttctttaccgaattgttctgccattgctttaccaataccgctactaccacctgtaatcacaactactttattttctaaatctgtaaacatatattgaagcctccttaaaagttattcctacaaaaaggtttagaacagacgtgttgttaatttggaatagtacaattaacgctgaacgctatgtcgatgttctaaacttaatgatgtgtaatatattaaatgatgcttaaccttttaaattacctaatataaaggctgcaatgattattaatacaatcccagcccaaataccaatcatttggcgtttgtcttttctttctcctagtaagaagataccaccaagtgtagatacaattactaataattgtgaaaatgagaaacttgttgctacaccaactttaggttgtgaatagaacataaataaattaccaattccccaaatgacacctgggataatattccacatagtactttttactgatgtctcatgtttagcagaaagtattaaaccgccaatagccatacctattgattggaagaagagggcattcattccatctacaccaaaaatttgtgctacgactacataaacaacgtaacctactgtagaaataatcaatataggaattgctttgccgaatttattgttaccgcctgaagcttcatttttacctttaattgaagttaatgcgataccaattactaataacaccatagcaactaaacctaatgtaacttgaattcctgtactccattctccaagaaaaatagcactgaataatgtcgtaccaactaattgtaaaccagtagagattggcatcgtttttgaaacaccaattagactaattgatttaagttgataaccctgaccaagcgcccaaaatgcacctgagattaaaccaacaataatgacggcgaggtcatcaaattttgcattacctgtaagtagtaaaataattccgataattaatgtacctaatgttgtccctctaatttgattatatgggccaccaccaacaagcacgttaattaaaacaacactaccccagaataatgcaggcaataacgcaattaacaaatccatatatactcactctttctattatattgtccctcgagaataaccatctttggttgttcctgaacatctagtttaaaacaaaatattacgttagtaaaaaatattaaattaaaaagaacgatttctttgtttattatgttttaaacatacattttatttgtgtattaacgaacttgttttgcttgcttcttaattaaaaatcagccaatatgtgcagcaacgtatttgaattttttatattcataattgatgttgaagcctaattcatgaaatcgttccacgagtgtattatttttactgcgaattttgaaataaatcttatcaacatcataatttgaaaatgtatattgaagtgcataggataataaatcaaaagcaatacccataaatctatagtcagtgtgtgaagaaaaatatttgatttcagcttttttcgtattttcaaaaacttgtaaataaagataaccttttaataagccttcagacataaatataaataatttattgtgactatctaacgattcaatgatttcttctgcagtcatcacatcgtgtttaaaggtatcatggtgtaacttctcgaatagtcgataataagcaggttggtaggtggtaatgttttgagcatgatcaattttacctatatcttgtgtagatatgagatgataatccgtaaaactataggaagcttcaatttctttcataaaaggcatgtaatcttgttccgtttcctcgaatgaaaaattaaaattcgcagtatccggtttgctttgaaccaaagcttcaaataaagttttaaaattttcttcagtgagtgaaagtgatttcctgacaaaaggaccgagcactttatatttattttcttcatatttaaatgcaagcatgagcatttcaatttgtgcttggtcatcaacttgtgcaaatacgcctggatcctctaaggattgtctaatcgttgcttcaacatcatcgtgtgcttgtggcagcttgtataagtacgatgtgtagtgataatcggcttcatttataaactttacaatttgatcatagttatttaattgaacaattttcataacaatacctccgtataataatctattaagttaattataagaacttttcgatgtaaatggaagttttgatgtgctacatacatgttacaataaatataatactgaatttgaaagggcgaaattatgaaatcactgattatagctgaaaaaccttcagttggtagagacattgccaatacgctaaacattaatgaaaaacgtaatggatattttgaaaataataaatatattgttacatgggcattagggcatttagtaacaaatgcgacaccagaacaatatgatgcaagttataaagaatggaaattgaatgatttaccgattatacccaataaaatgaaaacaattgtgataagtaaaacgagaaaacaattttcgacagtgcaatcattaattaataataataaagtaaaagatattattattgcgacagatgcaggacgagaaggagaactggttgctcgtttgatattggataaagcgcataataaaaaaccgaccaagcgtttatggattagttctgtaaccaataaagcaatcaaagaaggtttcaataaactgcaagatggacgtaagtttaataatctatatcatgctgccttagcacgaagtgaagcagattggatagttggtattaatgctacacgtgcactgactacaaaatatgatgcacaactctcattgggtcgtgtacagactccgaccatacaattagttcaaatgagacaaaatgaaatcaatcactttaaacctcagacctattatacaatgaaactcaatgcggctggtttaactttccattgtactaagccacagtcgcatcctgataaaactgttttggaaagtataaaaaaagcaatcgatgggcaatccgggcacattgcatcgattagcaagacacataaaaaagcatatccacaacaattatataatttaacggatttacaacaagatgcttataaacgatttcatcttggaccaaaagaaactttgaataccttgcaaacgttgtatgaacgtcataagttagtaacttacccacgtactgattctaactatttaacagatgatatggttgatacgctcaaagatagattgaaagcgattatggccacttcattaaaagatatggctaaagcacaaatgtcacaaacattttcatcaaaacaaagatttgttaataataataaagtatctgatcaccatgcaattattcccacagaagtgcgtccagatatcaatcaacttagccaaagggaatctaaaatttatatgatgattgctcagagatatttagaaaacctaatgccgccacacgaatacgaagcaatcgccattgaactcaaagtagggcagcatacatttacttttaaggacaaagtaactactaaattagggtttaaagcaatttatgaaaataaagaaagtataaatactcagatagatcagttacagaagggtacaaagcttaatgtaactaaaattctaatagaagaacatgagacaacggccccaccttattttaatgaaggatcacttttgaaagcgatggaaagcccacaaaaattctttgatttaagcgataaaaaacacgataaaacattaaaagacacgggcggtataggtacggttgcaacgagagcggatatcatagaaaagctatttaatatgaacgctattgaagctcgtgatggtaaaataaaagttacgtcaaaagggaaacaaatattggaattagcgccacaaaaactcacttctccattattaacagcagaatgggaagaaaaacttctactcatagaacaagggaaatataatgcgagccaattcatctctgaaatgaaagcttttacaaatcaggtagtcaatgagattaaagaaagtgaacaaaattataaacatgacaacctaacaacgactgaatgtcctacatgcggcaaatttatgattaaagtcaagacgaaaaatggccaaatgttagtgtgtcaggatccacagtgtaaaactaaaaaaaatgtacaacgtaaaacaaacgcacgttgtccaaactgtcataaaaaaatgacgctgtttggtcgaggcaaagacgcagtatatcgttgtgtttgtggacatactgaaacacaagctcaaatggataaacgacacaaaaataaaaaatcagataaagtaaataaaaaagatctgaaaaaatatatgaataatgatgaaggtattgaaaataacccgtttcaagatgctttgaagggtttaaaattctaaataattcgaacaaatagttaaaaaatttaagtaaggttcgtgtttgctattgtaaaatagttcgtttggtattaaaatatgtaagtattttaaaaaaaggagaactaaccgtgaaaaagtacttcaagtttgataaacacgaaacaaactataagaaagagatacttggcgggcttacaacattcttgtcgatggcttatattttagctgttaaccctcaagtacttagtttagccggcgtcgatggtgtttctgaaaatatgaaaatggaccaaggcgcaatatttgtagctacagcattagcggcgtttgtaggctcgttatttatgggattaatagcaaggtatccgattgcattagcacctggtatgggattaaatgcatttttcgcatttactgttgttttaacaatgggtataccatggcaagtcggacttacaggcgtattattttcaggattagttttcgcagtgttaacgatgacggggcttcgagaggtcatcatcaatgccataccttatcaaatgaaaatggctgtctcggctgggattggattatttattacctttgtcggcttacaaagttcaggtataattgttaaaaatgattctacactagttacattaggacatatcacagacggacctgtattacttactattttcggtatcgttgtgacagtaatactttatgctattagagtacctggcgcgatttttatagggatggttttaacatctatcgtaggtatgttcacagggctgatacatacacctagtggtatcgttggacaagtacctagtattgaaccgacgtttggcgctgcgtttgaagcatttaaggatcctagtcaattattaacggttcaatttttaatcgttatattaactttcctattcattgatttctttgatacagctggtacactcgttgctgtggcaactcaagctgggattatgaaaaataataaattaccacgagcaggacgcgcattgttctctgactcactagcaacaatcgttggtgcgatctttggtacaactacgacgacttcatacattgaatcaagctcaggtgtggcagtaggtgcaagaaccggctttgcgagtgtggttacaggtttctgtttcttgttagctattttctttagtccattgatggaggtagtaaccagtgcggtgactacgcctgcgttagtagtagtaggtgtcttaatggcagctaactttgctgaaattgattggaaaaaattcgaagtagcagttccagcatttgtaacgattattatgatgcctttatcttattctattgcaacaggtattgcttgtggatttatcttttatccaattacaatgttaatttcaaaacgtcataaagaagtacatccaataatgtatgcactgatgattttatttatattgtactttatctttgttcacggataacaaaacgaaataaaagcacattgttctgtcatttagacattgaacaatgtgcttttaattttattatttgaatgaaagtataagtgtttaggaattagttttgttcttacataaataactaaaatcgagtttcttcattatatacattttaaagttatagtagtttaagcggataaccagatcaaaatgcttagaagaatttatgacatataccgttggattgcgctaattacatttgagttgggcaggtatcctacgataataattaatgattcttacgtcgatcctccgtataaattacctttgcgtatttgtttggtacatatagtggtgtagataataaaatgaaaatgaaaaatagcattaaaaagaataaaatccaatggatcaccataccaacaagtggaatgaaagccaagaaagaaccaatcacacctaataaaggaataaacatcatcggcttaatagaattttgtttatctactattaatataatcatcattataaagtagagtagcgcgttaataagtaaaggctgccaaccaaaacttaaaacaatgcttccacctaagaatggaattccgtaaaccaattcactaactatgagtaagacagataatactaacaatgtcatacgtataccacgtttcatataattcaccacctaactgtttttaattataaaggaaagtaaactattagaataataatatgaagagagattaataaaaattttacaaagaactaaaaaaattacaaaagaggttgaagtgcgtttcctaataaagtacaataacaaagtatgtgttagacaaaaagtttcaaaacttttgcagaaaagcttgataaatcactgtttatcatgtatcatatctaatgttggactttaagaacacgcgatgaagcgaaaggttactgacacacccggccgctttgccatggcgctgtgtgagatagttttcgtggagaagtctatcacttaaatgtagacgatataaggagggaaaattatggcaaaacaaaaaatcagaatcagattaaaagcttatgatcacagagtaatcgatcaatcagcagaaaaaattgttggaacagcgaaacgttctggtgcagatgtttctggaccaattccgttaccgactgaaagatcagtttatactgttattcgtgccgtgcatgagtataaagattcacgtgagcaattcgaacaacgtagtcataaacgtttaatggatattgttaaccctacaccaaaagcagttgatggtcttatgggcttaaacttaccatctggcgtagacatcgaaatcaaattataatagaaaaaattaggaggtggactttcgatgaccaaaggaatcttaggaagaaaaatcgggatgacacaagttttcggagaaaatggtgatttaatccctgtaacagtagtagaagcaagccaaaacgttatattacaaaagaaatctgaagagattgatggatacaacgctatccaagtaggctatgaagacaaacaagcttataaaaaagatagcagatcaagcaaatatgctaacaaaccagctgaaggacatgctaaaaaagcaggcacagcacctaagcgcttcattcgtgaattcagaaacgttaatgttgatgaatacgaagtaggtcaagaagtctcagttaatacatttgaagctggagacgtaattgatgtaacaggcgtatctaaaggtaaaggtttccaaggtgccattaaacgtcataatcaagcacgtggtccaatgtcacatggttctcatttccacagagccccaggttctgtaggtatggcatcagatgcttcaagagtctttaaaggacaaaaaatgcctggacgtatgggcggtaacactgtaacagttcaaaacttagaagttgtacaaattgacgctgaaaacaatgttattttagtaaaaggtaatgtacctggtcctaaaaaaggatttgtagaaatcacatcatcaatcaaaggtaataaataatatacaacgaaaggaggaattgcataatggctaattatgatgtattaaaagtagatggaactaaatcaggttcagttgaactaagcgatgcagtatttgcaatcgaaccaaacaacaacgttctttttgaagcaattaacttacaacgtgcttcattacgccaaggtactcacgctgttaagaaccgttcagcagtacgtggtggcggacgtaaaccatggagacaaaaaggtacaggacgtgcgcgtcaaggtacaatccgtgctccacaatggcgtggtggtggtatcgtattcggaacaacaccaagaagctactcatacaaaatgcctaaagaaatgcgccgtttagcattacgctcagcattatctttcaaagtacaagagaaaggcttaactgttgttgatgcattaaacctagatgctccaaaaacaaaagagttcaaaactgtactctctaatttagaacaacctaaaaaagtattagtagtaacagaatctgaagatgtgaatgttgctttatcagcacgtaacatccctggtgttcaagtaactacagctcaaggtttaaacgttctagatatcacaagcgctgacagtgtagtaattacagaatcagctgctaaaaaagttgaggaggtgctcggataatggaagcaagagacgttcttaagcgccccgtaatcactgagaaatcttcagctgctatggctgaagacaaatacacattcgacgttgatactcgtgctaataaaacacaagttaaaatcgctgttgaagaaatctttgatgtaaaagttgataatgtaaacatcattaactacaaaccaaagaaaaaacgtatgggccgttaccaaggctatacaaacaaaaaacgcgtagcaatcgttaaattaaaagaaggatcaattgatcttttcaactaaaaaacattaccaataaggaggtaaacgacaatggctctaaaaaaatataagccaattactaatggtcgtcgtaatatgactagtttagatttcgctgaaatcacgaaaactacacctgaaaagtcattattacaaccgctaccgaaaagagcgggacgaaataaccaaggtaaattgacagttcgccaccacggtggaggacacaaacgtcaataccgtgttattgacttcaaacgtaataaagatggaatcaatgctaaagttgattcaatacaatatgatccaaaccgttcagcaaacattgcattattagtttatgctgatggtgaaaaacgctatatcatcgctccaaaaaacctaaaagtaggtcaagttcttgaaagcggtgaagaagcagatattaaagtaggtaatgcattaccattacaattcattccagtaggtacagtaatccataacatcgagttaaaacctggtaaaggtggacaaattgctcgttcagctggtgctagtgcacaagtacttggtaaagaaggtaaatatgtattaatcagattaagatctggcgaagtacgtatgattctttcaacttgccgtgctactattggtcaagttggtaacatccaacatgaacttgtaaacgttggtaaagcaggacgttctagatggaaaggcattcgcccaacagttcgtggttctgtaatgaaccctaacgatcacccacacggtggtggtgaaggtcgtgcacctatcggtagaccatctccaatgtcaccttggggtaaacctacgcttggtaagaaaactcgtcgtggtaaaaaatcttcagacaaacttatcgttcgtggacgtaagaaaaaataaaaataacttatttgcgtgtgcggcttaatagctgcacgcacacaataagaagggaggcgccactatggctcgtagtattaaaaaaggacctttcgctgacgatcatctaaagaaaaaagttgaagctcaaagcggaagcgagaaaaaacaagtaatcaaaacttggtcacgtcgttcaactattttccctgattttatcggacatacattcgctgtatatgatggacgtaaacatgtgcctgtattcgtaacagaagatatggttggtcataaattaggagaattcgcaccaactcgtactttcaaaggacacgctgcagacgacaaaaaaactagaagataatttctaacaggtagaggaggaaattcgaatggaagcaaaagcggttgctaaaacaataagaatcgcacctcgtaaagttagattagtattagatctaattagaggtaagagcgctggagaagctattgcaattttaaaattaaaaaacaaagcttcatcaccagtagtagaaaaattattaatgtccgctttagctaatgctgaacataactatgacatgaacactgatgaattaatagttaaagaagcttatgctaatgaaggaccaacattaaaacgtttccgtccacgtgcacaaggtcgtgcaagtgcgattaacaaacgtacaagccacattacaatcgtcgtaagtgacggtaaagaagaagctaaagaagcttaatatattttttaaggagggtacactgtgggtcaaaaaattaatccaatcggacttcgtgttggtgtaatccgtgattgggaagctaaatggtatgcagaaaaagacttcgcatcattattacacgaagatttaaaaatccgtaagtatattgataacgcattacaagaagcatcagtttcacacgttgaaattgaacgtgctgctaatcgtatcaacatcgctattcatactggtaaaccaggtatggttatcggtaaaggcggttcagaaattgaaaaattacgtaacaaattaaactcattaacaaacaaaaaagtacacatcaacgttatcgaaatcaaaaaagttgatttagatgctaaattagttgctgagaatattgcacgccaattagaaaaccgtgcttcattccgtcgtgtacaaaaacaagctattacaagagcaatgaaaattggtgccaaaggtatcaaaacacaagtttcaggtcgtttaggcggagctgacatcgctcgtgctgaacaatattcagaaggaactgttccacttcatacactacgtgctgacattggttatgcacatgcagaagctgacactacttacggtaaattaggtgtcaaagtatggatttatcgtggagaagttcttcctactaagaacactagtgaaggaggaaaatagtaatgttactaccaaaacgtgtaaaatatcgtcgtcaacatcgtcctaaaactactggtcgttctaaaggcggtaactatgtaacatttggtgagtatggtttgcaagcaactacaacgtcttggatcacatctcgtcaaatcgaatcagctcgtattgcaatgactcgtttcatgaaacgtggcgggaaagtttggattaaaatcttcccacatacaccttacactcaaaaacctttagaagtacgtatgggtgctggtaaaggtgcagtagaaggttggattgcagtagcaaaaccaggtagaattttatttgaaatcgcaggcgtaaacgaagaagttgcgcgtgaagcattacgtttagcaagtcacaaacttccagttaaaactaagtttgtaaaacgtgaagaattgggtggtgaaacaaatgaaagctaaggaaattagagacttaaccacttcagaaatcgaagaacaaatcaaatcttcaaaagaagagctttttaacctacgctttcagttagctacaggtcaattagaggaaactgcacgtattcgcacagtaagaaaaacgattgcacgtctaaaaactgttgctcgtgaaagagaaattgaacaaggtaaagcgaatcaataattcaattgaaagaggaggttactaaagtgagcgaaagaaatgatcgtaaagtttatgtaggtagagtcgtttccgataaaatggataaaacgataactgtacttgttgaaacatacaaaacacacaagttatatggtaaacgagtaaaatactctaaaaaatacaaaactcatgatgaaaacaactcagctaaattaggggacacagttaagatacaagagactcgtcctttatcagcaactaaacgtttccgtttggtagaaattgttgaagaatcagtaattatttaattaaatagtgaagataaaggaggtttaactcatgatccaacaagaaacacgattaaaagtagcagataactctggtgcgcgtgaagttcttacaattaaagtattaggtggatctggtcgtaaaacagctaacattggtgacgttatcgttgtaagtgttaaaaatgctacaccaggtggcgttgtcaaaaaaggtgaagtagtaaaagctgttgtagttcgtactaaatcaggtgtacgccgtaacgatggttcatatatcaaatttgatgaaaatgcatgtgtcatcattcgtgacgacaaaggcccacgtggtactcgtatttttggacctgttgctcgtgaattacgtgaaggcaacttcatgaaaattgtatcattagctccagaagtactttaataaaacatttgtaaatatataaatttaaggaggtgccacacatgcatatcaaaaaaggtgacaacgtaaaagttatcgcaggtaaagacaaaggtaaagaaggtaaagttgtttcaactgaacctaaaaaagaccgtgtcgttgtggaaggtgtcaatataattaaaaagcaccaaaaaccaactcaatttaatcctgaaggtggaatcttagaaacagaggcagcaatccatgtttctaatgtacagttattagaccctaaaacgaatgaaccaacacgcgtaggtcataaattcgtagatggtaaaaaagttcgtatcgctaaaaaatctggcgaagaaatcaaatctaataattaataattaattgaaaggaggatccactgtgaaccgtttaaaagaaaaattcaattctgaagttactcaaaacttagttaagcaatttgactacagttcagtaatggaagttccaaaaatagaaaaaatcgttgtaaatatgggtgtcggtgacgctgttcaaaatactaaagtattagatgatgctgtagaagaattacaagctatcactggtcaaaaaccattaattacaaaagctaaaaaatcagtagcaacattccgtttacgtgaaggtatgcctatcggtgcgaaagtaacactacgtggtgaaagaatgtatgactttttagataaattaattgctgtttcacttccacgtgtacgtgacttccaaggtgtatctaaaactgcattcgatggtagaggtaactacactttaggtgttaaagaacaattaattttcccagaaattgactatgaccgagtaaataaagtacgaggaatggatatcgttatcgtaacgactgctaacactgacgaggaagctcgtgaattgttatcacaattcggtatgccatttcacaaataatctctaaaggaggctaattaagtggctaaaacttcaatggttgctaaacaacaaaaaaaacaaaagttccaagtacgtgagtatactcgttgtgaacgctgtggtcgtccacattctgtatatcgtaaatttaaattatgccgtatttgtttccgtgaattagcttataaaggccaaatccctggcgttcgtaaagctagctggtaatagaaaatagtctgaaaggaggcaacaatcaatgacaatcaacgatccaattgcagatatgctaactcgtgtaagaaacgcaaacatggtgcgtcacgataaattagaattacctgcttcaaacattaaaaaagaaattgctgaaattttaaaaagtgaaggtttcattaaaaacgtagaatacgttgaagacgataaacaaggggttatccgtttattccttaaatatggtcaaaacaatgaacgtgttatcactggtttaaaacgtatttcaaaacctggtttacgtgtatatgctaaagctaacgaagtacctaaagtacttaatggtttaggtattgcattagtttcaacttctgaaggtgttgtaactgataaagaagctagaaaacgtaacatcggtggagaaatcctaggttacatttggtaataataaataataaggaggtgcgataacatgagtcgtgttggtaaaaaaattattgacatccctagcgacgtaacagtaagtgttgaaggtaacacaatcactgttaaaggtcctaaaggtgaattatcaagaacaatgaatgaaagaatgacatataaacaagacgaaagcactttagaagttgtaagaccaactgattctaaagatgatagaacagtacatggtacaactcgtgctttaattaacaatatgatacaaggtgttaaagaaggataccaaaaaacacttgaacttgttggtgttggttaccgtgctcaaatgcaaggtaatgacttaattttaaacgttggttactctcacccagttgaaattaaagctgatgatggtattactttcggtgttgagaaaaacacaacagtaactgttgctggtatttctaaagaacaagttggagcaatcgcttcaaacattcgttcagtaagacctccagaaccttataaaggtaaaggaattcgttaccaaggtgaatacgttcgccgtaaagaaggtaaaactggtaaataataaataactttcagaagaaaggagtattaagatgatcagcaaaattgataaaaacaaagtgcgtcttaaaagacatgcgcgtgtacgtaataaattagctggcacagcagaaaaaccacgtttgaacatctatcgttcaaataaacacatctatgcacaagtcattgatgatgtaagtggtaaaacattagcacaagcttcaactcaagaaaaagatttagcaaatgaatctggatcaaaagttgaattatcagctaaagttggcgaaactgtagctaaaagagctagcgaaaaaggcgtgaaaacaattgtatttgaccgtggaggatatttataccatggccgtgttaaagccttagcagatgcagctcgtgaaaatggtttagaattttaatttaaaggagggacatttacatggctcgtagagaagaagcgaaagaatttgaagaacgcgttgttacaattaaccgtgttgcgaaagttgtaaaaggtggtcgtcgtttccgtttcactgcattagtagtagttggagataagaacggtcgcgttggtttcggtactggtaaagcacaagaggtacctgaagcaatcaaaaaagcagttgaagcagctaaaaaagatttagttgtagttccacgtgttgaaggtacaacacctcacacaattactggacgtttcagttcaggcagtgtatttatgaaaccagctgcaccaggtactggtgtaatcgcaggtggccctgttcgtgcggtattagaattagcgggtatcactgatatcttaagtaaatctttaggttcaaatacaccaattaacatggttcgtgctacaatcaatggattaaaaaaccttaaaaatgctgaagatgttgcgaaattacgcggcaaatcagtagaagaattatacaattaaggagggaaaataagttatggctaaattacaaattaccctcactcgtagtgttataggtcgtccagaaacacaacgtaaaactgttgaagctttaggtttgaaaaaaacaaactcttcagtagttgttgaagataaccctgctattcgtgggcaaatcaacaaagtaagtcacttagtgacagtagaagaaaaataattttaaggaggtgccgatatgaaattacatgagttaaaaccagcagaaggttctcgtaaagttcgtaaccgcgttggacgtggtgcagctactggtaacggtaaaactagtggtcgtggacaaaaaggacaaaaagcgcgttcaggtggtagtgtaagaccaggcttcgaaggtggacaattaccattattccgtcgcttaccaaaacgaggttttactaacatcaaccgtaaagaatatgctattgttaacttagaccaacttaataaatttgaagatggtactgaagtaactcctgctttattagtagaatctggtgtagttaagagtgaaaaatctggtattaaaatactaggtactggttctcttgataaaaaactaacagttaaagctagcaagttctctgcatctgcagcagaagctattgatgcaaaaggcggagcacacgaggtgatctaatgtttgtaacgcttgtgagcttctttaaaacaaaagaagttcgtaacaagatcttttttactctcgcaatgttagttatttttaaaataggtacttatattccagcacctggtgttaacccagctgcttttgacagtcaacaaggttctcaaggtgtcactgacttgttaaatacatttggtggcggagccttgaagaacttttctatctttgccatgggtataatgccttatattactgcgtcaatcgtaatgcagttattacaaatggatattgttccgaagttttcagagtgggcaaaacaaggtgatgcaggtagaaagaaacttaataacgtaacgcgttattttgctattgtacttgcttttatccaatctattgggatggctttccaatttaataattatttaaaaggtcaattgatcatggatcaatcgattcttagttatttattaatcgctgttgttttaacagctggaacagcattcttaatatggttaggtgaacaaatcactcaattcggtgttggtaatggtatttccattatcatcttcgctggtattttgtcttcattaccttcatcactaatccagttttatcaacaggcctttgttggccaagatgatacttctatggcttggttgaaagtaattgccttaattattggaatgatattattaacggttggtgcaatatatgtactacaagctattcgtaaaattccaattcaatatgcgaagaaacaatcagcacaacgattaggttcacaagcaacatatttacctttgaaagttaactctgcaggtgttatcccagttatctttgcaatggcattcttcttgttaccaagaacattgacattgtttttccctgacgcaagttgggcgcaaaaggtatcagacgtggcaaatccatcgaataacattggtatgattgtgtacgttgtactcatcatagcatttacttacttctatgcatttgtacaagttaatcctgaaaagatggcagataacctgaagaaacaaggaagttatgttccaggtattagacctggcgaacaaaccaaaaaatatattactagagttctctatcgtttaacttttgtcggatcaatattcttagctgtaatagcgattctgccaattattgcaacgaaagtaatgagcttaccacagtctattcaggttggtggtacgagcttactaattgtaattggtgtagcgattgaaacaatgaaaagtctagaagctcaagtgagccaaaaagattatagaggctttggtggtagataaattgtaggagggcatttatgaatatcattttaatgggtttacctggtgcaggtaaaggaactcaagcgagtgaaattgttaagaaattcccaattccacacatatctactggtgacatgttcagaaaagcgattaaagatgaaacggatttaggtaaagaagctaaatcgtacatggatcgtggagaattagtccctgatgaagttactgtgggtatcgttaaagatagaatatctgaagacgatgcgaaaaaaggattcttacttgacggctttcctcgtactattgaacaagctgaagcattaagtaatatcatgaaagaattagatagagaaattgatgctgttatcaatatagaggtacctgaagaagaattaatgaaccgcctcactggtcgtagaatctgtgagaaatgcggaacaacttatcatcttgtattcaatcctccaaaagttgatggtatttgtgatcttgacggtggtaaattatatcaacgtgaagatgacaacccagaaacagttgctaatcgtttaaacgtcaatgtaaaacaatctaaacctatcttagaattctatgataataaaaatgttttgaaaaacattgatggttctagagatattaaagtcgttacaaacgacgtcattgatatcttagaagatttaaaataagatcaactttgtacggtctatgtaatgtcaaaggtataattaaataagagtgacaatgcgattacgtaattcattatatttgttaaactgattaacaacacttatagacacgtatggttagagttgatttttgacgataaccgactatttcataaagggggaagttaattaatggctaaacaggatgtaattgaattagaaggtactgtattagatactttaccaaatgcaatgtttaaagtagaattagaaaatggtcatgaaattttagctcacgtaagtggtaaaattagaatgaattatattcgtattctacctggcgacaaagtaacagtagaaatgtctccgtatgatttaacacgcggaagaattacgtatcgttataaataatcgtcactccataatatagggaggtttaaaaatgaaagtaagaccatcagtaaaaccaatttgcgaaaaatgtaaagtcattaaacgtaaaggtaaagtaatggtaatttgtagcaacccaaaacataaaacaaagacaaggttaataaagagaggtgtaaataattatggcacgtattgcaggagtagatattccacgtgaaaaacgtattgttatttcattaacttatgtgtatggtatcggtactactacagctaacaaaattgctgaagaagctaacgtatcaccagaaacacgcgttaaagatttaactgatgatgaattaggtcgtatccgtgaaattgttgacaactataaagtagaaggtgacttacgtcgtgagcaaaacttaaacattaaacgtttaatggaaatctcatcataccgtggtatccgtcaccgtcgtggattaccagttcgcggacaaaaaacaaaaaacaatgctcgtactcgtaaaggcccagttaaaactgtagctaacaagaaaaaataataggtaaaggaggcaaaatttaaatggcacgtaaacaagtatctcgtaaacgtagagtgaaaaagaatattgaaaatggtgtggcacacatccgttcaacattcaataatacaatcgtaactattactgatgaatttggtaatgcgttatcatggtcatcagcaggtgcattaggatttaaaggttcaaaaaaatcaactccatttgcagctcaaatggcatcagaaactgcttcaaaaacagctatggaacatggtttaaaatctgttgaagttactgtaaaaggtccaggtcctggtcgtgaatcagctatccgtgcgttacaatcagctggattagaagtaactgcaatccgtgacgttactccagtaccacataatggttgtcgtccgccaaaacgtcgtcgcgtataattttattgttattgtcgcaggtcactgagaaatacagtaaaaatcaatcgacgtaaacaaggaggatatttgtaaatgattgaaatcgaaaaacctagaattgaaacaattgaaattagtgaagatgctaaattcggtaagttcgttgttgaaccactagaacgtggctacggtactacactaggaaactccttacgtcgtatcctactatcttcattaccaggtgcagccgttaagtacattgagatcgaaggcgtattacacgaattctcagcaatagacaatgtcgttgaagatgtatctacaattattatgaacatcaaaaaactagcattgaaaatctattctgaagaagataaaactttagaaattgatgttaaagatgaaggcgatgtaactgcaagtgacattactcatgatagtgatgttgaaattttaaatcctgagattaaaattgcaacagtttcaaaaggtggacatttaaaaatccgtctagttgctaacaagggtagaggttacgcattagcagaacaaaacaaaactagtgatttaccaattggtgtaattccagtcgactcactttattctccagttgaacgtgttaactacactgtagaaaacacacgtgtgggtcaaagtagtgattttgataaattgacattggatgtttggacaaatggttcaatcacaccacaagagtcagtttcattagctgcaaaaatcttaactgaacacttgaatatcttcgttggattaactgatgaagcacaaaatgctgaaatcatgattgaaaaagaagaggatcaaaaagaaaaagtacttgaaatgtctattgaagaattagacttatcagtacgttcatacaattgcttaaaacgtgcaggtatcaactctgttcaagaattagctgataaatctgaagcagatatgatgaaagtacgtaatttaggtcgtaaatctttagaagaagttaagtataaacttgaagacctaggtttaggtttaagaaaagaagattaatataaaggaggttaactcatgggttacagaaaattaggtcgtacttctgatcaacgtaaagcgatgttacgtgacttagctacttcacttatcgttagtgaacgtgttgaaactacagaagcgcgtgcaaaagaattacgtagtgttgttgaaaaattaatcactttaggtaaaaaaggcgatttagcttcacgtcgtcaagcagctaaaactttacgtaatgttgaaatcttaaacgaagatgaaacagtacaaactgcattacaaaaattattcggtgaagttgctgaacgttatacagaacgtcaaggcggttacactcgtattcttaaagtaggtcctcgtcgcggcgatggtgctgaatcagtaattattgaattagtttaatttaaatacatgtactactatatataaagcaaatgagtgcaacgataatgtttgccacatacaaatattgtctagctcagagtaccccatcaaaactaaataaaactttaaagcgtgaactcaaaaattatgatggggtgcgcgcttttttatattattagacccccttaattccaaaggaatttagggggtcttatgcaattgcggagcaatagcaatcgactgaaccttaattccaaaggaatttagggggtcttatgcaattgcggagcaatagtaaaccactgaaccttaattccaaaggaatttagggggtcttatgcaattgcgagcaatagtaaacattaattattgcaacttaaacacgtttttaaattagaatacggattgattttgtcacaatgattaactatctaaactttctttagattaccttttcatgtaaaatagataaggtatataaaaagcgttatgattaattgggaggctagagatatggatacgcatgacaatattattacatttaaccatgttagatttaaatataatagtgatgagccacttgcgttaaatgatgtatcttttggcattccaaaagggaaatggacttcaattgttggtcataatggttctggtaaatctacgattgcaaaattaatggtcggtattgaaaaacctagtgatgggcatatttattttcgtaatcaatgtattaaccaacaaaatttgagtgatttgagacagcatataggcattgtctttcaaaatccagaaaatcagtttgtgggttctacagtagcgttcgatgtcgcttttggacttgaaaataatagcgtctcatatgacgatatgcaacgtatagtgcccaaagcgttggaagacgttgaaatgttagatagagcagattatgagccacagtcactctctggtggtcaaaaacaacgggttgcaattgctggtgttcttgcactaaatacagatgtaattatattggatgaggcaacgtctatgttagatcctgcaggaagaaaagaacttattagtttaatccatcgcttgaaagaagaaaaagaggttacaatcatttctattacacatgacttaactgaagctgcagaagcagattatttagttgtcttaaatgatggtgaagtatatcaaacaggtaagccgcatgatgtatttaatgatggagacggtttgacggaaattgggttagatttacctttttctattcgcatggcacgtactttgttggggagcacggattttataacttatgaagggctggtaaaaaaaatatgacagtcaaatttagtcaagtaagttatgtatatcaaaagggtaccccatttgaacatgtagctttaagggatattgaaactacatttcaacaagggaaatattacgcagtcataggtcaaactggttctggtaaatcgacattaatccagcattttaatggtttacttaaaccttctaccggtaaattgcaaatcgatgatataaccattacccataaaactaaggataaagtattgaaacaaattcgtaagcgtatcggtgttgtgttccaatttcctgaatcacaactctttgaagattcagtagaaagagaaatattgtttggtccaaaaaactttaatatgcctatagatgaagtgaaagcacgtgcatataagctattaatcgattttggttttagtagagatatattgcagcaatcaccttttcagatgtctggtggtcagatgcgaaaaattgctataacatctatattggctatggatccagatatcgttatattagatgaacctacggctggacttgatccaaaaagtagagatcaaataatgaaaatgattaaaaaactgcaagtagaacaaaataaaacaatcatacttgtgacacacgaaatgaatgatgttgcaaaatatgtggatgaaataaaaataatgaaacaaggtcaactcgccgaagaatgctcacctagaaagttgtttagtgatacgaattatgttaatcaattgcatttagatgttccagatgttgtaaaattgcaaagagatattgaggataaatatcaatattatttcaataaaatagcattaacagaagatgaatttattgatatgtataaggagtggcaagaagatgaaagataagtttataattggacgctatcttcctttaaatacaattatccatcatttggatcctagagctaaattaatatttgtatttttatttattgtgttaatattttttgcacactcatttggaacatatttatggttatttattttgataattagcattatgaaattagcacatataaaattttggttcttaattaagggattaacaccaatatggatatttttaatatttacctttcttatgcatttatttctaactaaaggtggttcacgcatatttgaaataggatttatttctatagatatacagggtattctagaaggtatctatattgtacttagactgatgtttattatcatgatatcaacgattatgaccttaagtacaagtccgatagatttgactgatgcgttcgaacgattattatcaccgcttaaaattgttaaaataccagtacatcaattgagtatgatgatgtccattgcacttagatttataccaacattaatgaatgaattagataaaattattttagcgcaaaaatcacgtggttcagaaataagttcaggtggacttattaacagaatcaaagcatttatacccttacttatcccattatttatttcagctttccaaagagcagaagatttagctatagccatggaagtaagagggtacgatactcaaaaaatacgtaccagctatcgcagattagagtggcagtttaaggatacaattacattaattttgattatacccattgccattatattatttggtttaaaatatttaggagtgtaataacagatgcgagtcttagttaatatttcataccaagggagccagtttcttggtttccaaattcagcaacacggaagaaccattcaacagcaatttgaaaagatattaaaacgcatgcataagcatgaggtaagaatacatccaagtagtagaaccgacagaggcgtacatgcgattgaacagtattttcattttgatacagaattaaatattccagaacagcaatggcaatatgcaatgaaccgtgcgctaccagatgatatttatgtcaatgatgtttcttttgttaatgatgattttcattgtagatatgattgcgttggaaaatcttatcgttataagatttatcaatcagcccataaagatccatttctttgtggattaaaaacttatgtgcctgaacagttagatattgaaaagatgaatatggcagctcaacattttataggcacacatgatttcacaggcttttgttctcagaagactgaggttgaaagtaagataagaacattatatgaaagtcgcatagaaaagacagaaagtggctttgactatattgtcacaggctctggattcctatataatatggtacgtgtgttaattgcatttttaatagaagtgggtaaaggcaagagagaaccacaagaggtcccacagttattagaagcaagagatcgtaatcaagttccctttaccgcaccggctgaaggattgtacttagagaagatttatttaacacccaatgaattaattcaagactttggtaataatataaaaatacatcaaaaaaaatcatcacaaaatctttaaattagattgacaaaacgacagaaaaattatacgattactaacggtattgttttatatcacccacgataagccccggaatcttattgtgtaacacgatatagaagcacgtagaaacaaacaattaataaaataaatgaaatctaagttttaaaaagtataaactattaaacgagaaacatttattcattctaggaggacaattatatgcgtcaaacatttatggctaatgaatcaaacattgagcgcaaatggtatgttattgatgctgaaggtaaaacacttggtcgtttatcatcagaagtagcagctattttacgcggtaaaaataaagtaacttatacaccacacgttgatacaggtgattacgtaatcgtcatcaacgcttcaaaaatccatttcactggtaataaagagcgcgataaaatgtactatcgtcactctaaccacccaggtggaattaaatcaatttcagctggtgagttaaaagcgaataacccagaacgtttacttgaaaattcaattaaaggaatgctaccaagcactcgtttaggtgaaaaacaaggtaaaaaattatttgtatatggtggcgctgaacatccacacactgcacaacaaccagaaaactacgagttacgtggttaattaaaaggaggaaattacattggcacaagttgaatatagaggcacaggccgtcgtaaaaactcagtagcacgtgtacgtttagtaccaggcgaaggtaatattactgtaaacggtcgcgatgtacgtagctatttaccattcgaatcattaattttagacattaaccaagcattcgatgtaacagaaactaaaggtaactatgatgtattagttaacgttcaaggtggaggatttactggacaagctcaagcaatccgtcacggaatttctcgtgcattattagaagctgatcctgaatacagaggttctttaaaacgcgctggattacttactcgtgacccacgtatgaaagaacgtaaaaaaccaggtcttaaaaaagctcgtcgttcaccacaattctcaaaacgttaatcgatttgttatcaattcaacatcaaaagtcattttatggtgtcagttggtgttaaagagacaattcatttaatagatttaaagcatcagcatcttgctgatgctttttttctggcattaattcaagataataattttgagtagttagtactgaattatgtccaagacgccttgatatatagtctatactgatatctttagagaataaaaatgaagcatgtgtatctcgtaggccatgaaaagttgttttctgaatatccaacttattaagtaaatcatgcaattgtttggcttgatgaaaaccagcagttttgaatatataatcagctttcttagaagacaattttagcaaagcgttataaacatctttattaatagtaatatcacgtttagaatgttttgtctttaagctaatgtcagagttagtagggcttattgaacgttgtattttaataccatacttaaaaatatcatcttttgtaatacccaataattcccctctacgagctccagtttcaagtgctaataatactaaaacattaaattcatcttcttgatttgataggcaataatgtctgagtgttttaaattcagtgattgaaagagggatgttcttttttttagtctcttttccttttgccttaagtagatgaccaaaatcatttgatattaaaccacgggcatatgcatatttcaatgaccctttaatttttaacattaattctttagtggtttttttagaatgagtctgggcatatatatcaagttttcgctgtattacaatatcatttaagttttttagttgtatatcattaaagaacgtttcaataattgttattgttcgcatgtagttgatatatgttgcttctcttacatcattttttttaattatctccacccaatttctataaaaattggaaaacttggtagtacgatcagcaatattttttccacgacctttttctaattccatctcaagagcccataattcagcatcttttttatctttaaatgttttggtttctcttttatacactccctttttatatagtgagattgttacacgatatgagtttcctcgtttttttatagttgccattttatcaacctttctgtttgaatgataaaatagactagtctatataaagatatataaatttttcatttacttcaactaattgactaatctaaacagtgattttcaataaactctataatttttgattttacaaatctttcttgtttaccaaccataaatgatttgaattcaggatgattacggatgtatttatcaaatgatttaggatcaattccaagcaattctgatgcttgttttctagttaataagattggggagtctttcattttagttttcctccttatttttaactggatgatgccgtcttgaatctaagtatcgtgcaaaaaaatatgttctatcaactattagatctagtaaaagatagttattatctctagcgaattttacgagatcttgaaattcagtgaaatcatttatttcaataatatctattacctcattcatgaaaatttttgagttctgttccaacaggaatttatcaatatcaaatcctgctccatactctatatcatcgatattatatggtgttttatcaggattttgggcgtgtgtaaaatagtcaaacattccttttggtgacataactatttcaacatgagtgggactatttaagctttcgctaattaattcagatacttgtgaataactttttaatgattcaaaaaataatgctccatgtttgtgagatttcttaatttcacctgtacttgaattggtgtctatgttatgccatggacttaaaacaaacggtacatggatattttctaagatttctaagtaattttcaggtacactttcttcgtaaataaggaacgtccatttagttgatcgtttttcttttttcaaaattattacctgctttctaatttgattattgattattgatagaatgggggtcgtagtggccccattcaatttgagtacattggcgcttgtggttttcactttgtgaaccacagcgccaattaatttcgtttttgaccttcataccatatatgccttctgatacgctgtggtgatgaaaaatagtattctggatgtctacttgaaatttcttctttgatatctgactccattgcttttaatagtttttgtgcttgttgcatacgaggtactttaataaaaatctttactttatctttgtgtacatcgaccacacattttttaattgctttattaaaattctgggtgattggattacgttttgtgttatcgctcttatcacaatatgatgtatcttcagtcatatcactttgagctaaaaaatgacggaaggatattgtgtaatatacagatttgaaatgattccatatggagtctttaatcatacgtttaattatgtcaatcacaataagtaaacacgcaataattactaaactgatattgagtttaagtaataaatttgtagataaattgatataataaataagtcgagtaagatttaatatatcaatcattgacagtaatgtacttagaaaatgaaatagtccaccaaaaagtaaaacaaatagtgcataaatgaatagatagatgattaaattataaatacgcatgaaataggttttagtcattataaaacaccagctttcgtataataagttggacacaagagtggaagaacttgaaacggcgactcattatcaattatttgaattagcccagtacccttacctataggaacaacaataccttcagggtcaaggtcggggaataaaaattgggttgtttttttatttatattaccaatttggattaatacattgagctgttcccttacagatataggaattgtattatgatcgaaacgttgtgatacgagtaataaatgaacttttgtcgcacgcccgagcaacgcaatttgtgaaagtaacgagaagaaggcatctttaattgttttattaataccttctgataaagctagtacttcatctattacaactgtaatatgtttaaattgatggtcaggattatcatagagaatggtttgtctttgttgaatagttgttaaacattggcttaaattttcgttaacttcagatacaaagtcagacttagagcgatttttacttggatgaatgacaggaatatcattttctcttgcccaacggcttggtgtatcaaatttggggtctacgacgattaaatcagacatcggttttaaaatatttaacaagtatgtcagtgtatatgatttgccactccctgaatttccagcaatggctatagatgtaattttattatagttaatagttaagtttttcatgataggtatttgattgtctctcagtgatgatgtaaattggtctaaatcagcaatcacaagacgctcagaaacacctcttttccaagggaaaaatagagcacgttgtatatgcatatcatcagtatctataggtataaagtaagcagaattttgcttgagcagcgtatatcttggatataatgctgcactagcaattaagaaaattttctgatacaaatcattatctatgatatagcctgaaggtaagtgaggaagaaatatgaaaccatcttctttcacttggcaagtaaaactattagtataactcgtttctccttgtatcattgaacctaaggccatattcaaactttgaagaaggtacttttcaagtgctttttggttcattatttaacctccttaatgtttgaagctttgaagtaaacgttattacgtatttcgcaagcttctaaatcgtcaaattgaatcattgagaaatatttaggaaggctgatttcagtttcaaatttaactgtgaaaggtggcaacccttcctgagaaaaccatgctttgtatgcaataatttcacctgttggttgattatcttcaaaacgttgttgagggaaaagttcagtacttaagctataaattggtttattagtgttaatgtactcaagtgctgtgttactagaatatccattctttttaaattttggttgaattttcatggaaaaactccttttgtttaatattttggataatcaatgggccctttgattacttatataatctcaagaaagttgttataatataaggtgaaaaaaattattcggttacttaggaggatattttgattattgtaaaaagtaatagagaggaaattttcgattttaactattggttggaacataatttaactctttacgatattgagagaattttaaatacccaatcaatagataaagaacaacagaaattcaaaatagaatatcaaaaacttcaattgatagaagaagaaaaagaattatggttttctctaaaagaagccgcttatattctaaatggaaatagctttttaatttatgctgaatctgatgagaaggataaaaggaatgtgagtgctgattatgtaaaaaacaaaagtaatgatattctaaataatatagatgaactattaagtgagagaaaagaagactatataaaacaatttggaacaaaagggctagaatcatatcttcaaagtataaaaccgcaaaaaaagagtttttcattaagtaaaatgaaacatataaatgcacaaatgattgacgaaatattgagggttaatatatcaagatcagaagaaataaaattcagaaacattaaaactgaagatgttttaccgtcaaaggaagaaatcacaaaatatattaattatgatagttgcctaaaaaacaatgatagtgtaatagaatatttaaataagataagtactgaattaggtcaagctctatcagatagttcgaaatttttaaataatatttcatttcttaaaactatagttaaagaagttaaagaagatgtacaaaatatgcatagaaatttagggattgatgttcaggtgaaatataaagatatgaaaaatgagtacataaaattattaagaatgtgcaaaaaattttctaatgactatataaatataattgacattgaatatatatttaacacatatgctgatatacatatcctttataatgatactgataacactgaaatcataaatatgcctgatattaatagtgaacatcagatagccaagaatttcaaaaattttattgattcacggaagaaacaatatttaatggatattgattggagcaaacactatatatataagaatttgaacaaaatcgaagagaatccgacaacatttcttaatggaactatggaaataacaagaatttcagattggatgtataggaataaaacaaaagttgcttatcaaataattaatcagaattttaatgacgcttatgatttattaaatggaatgcttaaaagtgaatacattaatattattggatttctgagattttggtatgatatgaatcaaaaagatagaaattagttcatcatagtaaaaataaataaaaaacgaaacgaagtttagaataattgttaatatatatttaaagatattgatattactagaatagagggtttgcaaaaatacgtatatgttttaaaaatgtataaacatctatgtaaatgtttgctttggataacatttcaagagttatcaagtctattataataaagaggtattaaaatttgatgtatggagagataatatgagtacaaacatattagatgaaatcagtgagatactaaatggaattgaaagatattggataaatgaaaaattagcaaaacaactaataatagaagatttaagaaataacgatactaaactgatttctaaacttttatctaatcaagcaatcaatgaagcatatgttcaagacatagatgggtataaaatattcgacaaagaatcattcatttcaatgttacgttataaaaattactggcaagatagctatactaagtattctaataaaattggtttaacggttgaaggtaagtatttaaactataattctgatgtcgtattagactttccatttaaggactgtgtgcttgagggtggaatgacaaaagaagatagtgtattaaaaaatgatgaaaaattttataatcaggttattgcaaaagaagaaatagatacattacttgcacctaaagctttaaccaatgtaataaagtatgatgaaaacaatgagtaccaaatagataatatagaaatagatgataatttaattataaaaggaaataatttgattgctctacatactttgaaaaaaagatataaaaataaagtaaaacttatttatatagatccaccttataacacaggaaaagatagttttcaatataatgataattttaatcattcctcatggatgacattcatgaaaaacagactagaaatagctaaagaattactaaaagaaaacggtataataagcattaatatagatgatgatgaagtacattatcttaaaattttagcagatgaaatttttggacgtgaaaattttattagtaatattatttggcaaaaaaagtattcaccccaaaatgatgctaaatttttttccgatatgcacgaccatattttaatttatgctaaaaataaagataaagcagaaattaatttattaccaagaactaaagaaatgaatcttcgttataaaaatcctgataatgacattcgcggcccttggaaagctggagatttttcagttaaaacatattctaaggaatatgattatcctattaagactccttctggaagaattgtaactccacctgaaagtagaagttggaggacttcttattcaaggttcatagaattaatagatgataatagaatttggtttggggaagatggcaataatgttcctgcaataaaaaaatatttatctgaagttaaacaaggaagaactgctagtactttatggttttatgacgaggtaggtcataaccaattaggaagaaatgagttgttaaaactatctttaagaaattttagtaccccaaaacctgaaaagcttttgaaacaaattatacatttatttacaaatgaagaagaaataatacttgacttttttatgggttcagctactacacaagctgtagctcataaaatgaatcgtcaatatataggcatagaacaaatggactatatcaatagcgtttctgtcccacgtttacagaaggttattgaaggagagcaaggaggaatttcaaaagatataaactggagaggtggaggttcttttgtatatgcagaacttgcaaaagaaaatcaagaaattgttgaaagtattataaattgtagtaataaagaagaacttaaccaacaaatcgatagattagtggataatggtgttcttaattatgaagtagattttgataagtttacaagtactaaaaaagaattttatgaattagaacttgaagatcaaaaagaagtgttaattagagtgttagacaataatcaattatatgttaactactctgatattgaggattctgcatataatttcacagaagatgaaatagcgtttaaccatagattctatggaggtgagtaaaaatgtcggaaatgctacatgatcgtatagagaaccaattatttttacaatacccagatatcccaaattatattattgacaatctgaatcataacttgagaccgtaccaagaagaagcggttcaaagattaatgtatcttaataaacaagatgaaggtaatttatataacaaactgatgtttaatatggccacaggttctggtaaaacacttgtcttagctgcatcagtattatatttatttaaagaagaaggttatcaaaatttcttgtttttcgttaatagtacagcgattgtaaataaaacttatgataatttaactaatacatcatctagtaagtatttgtttaataaagatggtattgtcattgatggtaaggtggtaaatattcaagttgtagataattatcctgttttgcctgatgaaaatacaatttatcttaaattaacaacgatcaatgcactacatgataaattaaattatccaagagaaaatgatattacctatgaagatttagctcaattccctattgtgttattagctgatgaagctcaccacttgaatgttagtacaaagaaaaaaggaaagaagaataaagaacaaattgaagaaactaactgggaagtaaccgttgatagaattatgaaacaaaataataagaataagttattagaatttacagcgactgtacagttagaagatgatatttttgaaaaatataaagatagaattctttatagatatgatttaaaggaatttatgcaacaaggttattcaaaaaatgtgacacttttatatgctagtgaagaaaatgaggataaaataatacatgctttattaatgaatgaatataaaaaatatatagctgataaaaaccatataactcttaaaccagttataatgtttcaatccacttctattaaaggctcacaggaaatacatcaaatgatgcttaatcgtttagcgcagttaacttatgagcaattagaaacaattattgatgatggttatacattttatagtggtcaaaatagtatttggagtaaagtgtttggtttttataaacaagcaaatttactaaaagtgttagatgacttgaaatgggactttaatgaacaaactacattaaatgttaataatgataaagaaaaagagaaaaatgccgaattacttaataatctagaagatgctgataatcctataagagctatatttgcggtgtacaaacttaatgaaggctgggatgtcttaaatctttttgatattgtgaaagttgatgaaaagaagaaagttaataaaaatgcgacgaatgcggaagcacaactcattggtagaggggcgaggtattttccatttatttatgaaaaagaaaaatcttataagcgaagatttgataatgaatttagtgatttaaaagcaatagaaacgctacattatcatacgattaatgattcttcttacattaaaaatttacatcaatctttaacagaagcaaaagttcagacaaatgctgatataagcgagatacacgaaggaaaagtgaaaaataaatttaaaaagactgatctttttaaattcgggaaaatatatgttaacaaaacagtgccaacaactgctgaggactacatgaatttagaaaattataatgcatctagggaatatcagaaggatctattcaaagtaagtgagtcaaatttaattcaaggtatcaaagctatagtggaagaccgtaaagaagtaaaactaaatcttaataagccattacttcaaaaagctttaagaagtaacccattctttagatattctaatttaaaagagtacgtacctaatattacgagtatacaaacattcattgattcaagagaatttttaggggatttgaatattagtgtgactatacctaaagaaatgaatgttagtgaaattacaccaaaaataaaattgtctgtgttaaatgattatttaagtaagatagagacgaacattaaaaataactatctaaaagtaaaaggtacacctatttttgaaggtataaaactgtcagaattaattgatgattatgttgttgaagtcaataatgtcaatagggatgtaacagatttagacgatcagaagagacctaaaaacatggaacaacatgattggtacatttatgataaagccatagtaaatggtcttgagcgtgatttgattgatttaatcaataacatgatggaagatttacaaaataaatatgatgaagtctatttaatacgtaatgaacgtaaaattaagtttagagaaatcaatggtgttaggggctttatgcctgatttcttattgtacctaaaagataatgaatacacatatcaggtatttgtagaacctaaaggtcaacacttattattaaatgataaatggaaagagcaatttatgttatcgcttaatgaaagagatgacattgaagtgcttgctgaagataaaaatgttcgtttagtgggattatgtttttattcggatgattcgacaaaaagaaaagaatttaaagaatattttaataaagaattaggataatctcattacagtattagaaatgaagaactttttcatagatgaaaaaatatttaaatagaagagaagtattgattgttaatacttctcttcagatcagactagtctattttggtgttaattggtatcaatatcgtcaatttatatcaaaatatgtccttataaactactttgtcaaaaaatgaattgctgatgcaaaggtatttacatggattcagatattataaaatttaataaattacttctcaaaacgttaatattaccgaaactgttgcgaatctattgttcgcttacagatttggtacacgagttgcaacagcaatttgtgttcaaattaatcatcgttttaaagctccagcataagctggagctttttttatttattatagatatcacaatgactactaaatgatgcttatttgagtcatttaatctataatagtagtacacaattttttaatttggagtacgaatatgaaaaagagaacagcgatatatacaactatcgtaatgatgattattttatttgtcatcattacaatttcaatttttaaatttaacgacaatagaaaaattagtcataacgatcgtagtcatatacccacgttttatttacatggttatgcaggtacaggaaactcaatgaagttattagtgaacgctgctcaccaatcagataatgaaaaagatgttgttagggcaagggtatctcgaaatggaatggtgacatttgaaggggatttaaattttaatgcgaaaaatccaatcattgacattattttagaagataatacaaataaagatttaaacaaaaatgcacagtggattcgaaatgtcatcattgcgaccatgacacagtatcattttaataaatttaattttgtagcacactccatgggtaatcaatctttcagttattatatgttgaattatggtgatgatctgcatttaccaaaactaaataaacaagttagtttagcaggaaattttaacggcgaagtagacatcaatggtttagatttaaatataacattgaacaatcaaggaaaacctaatttaatgttaaaagattataaagatatattaccaatgaagcatgaatatactaaagatgctcatgtgttaaatatttatggtgatattggcaatggcacacattcagatggacgtgtaacaaatgtatcttcaaaatcgttggaatatttactaggagatcacatagcaagttatgaaacctttaaagtgacgggccctcaagcagagcatagtgaattacatgataatcaaactgtcatagataaaatcaacacatttttatggggaaatgaaaagcattaacaaaataagccagtgtctacccaatcatcatgttggtagcactggcttatttaagcattagctttagataataaatttaataatgatttacgattttcttcaccaaatacgtgtggttgaatcatgatttcgtcaatatcaaaatctgtcatcattaattttaattttgagatgacttcatctggagaacctacgataactctattttgatgttgttctattttttctaattcgcgggacgaatattttcgttgtgctgcataagaggtcgacggataaaatttaggttgatccaagtagttaattcgcagtaaccatagatgaaaagcatgtgctaatgactcacgctgacttgcgtcggtagctgttatgacgaaagaagacataattacatatgactgttttgctgggtgatattgtttgaacaaccaacgataatgattaatcactgattgtatttgatttttattttgccccatgttggcaatgacaaaagagagcccttgtttagccgcaagtgtagcgcttgttttacttgtacctaagatgaacatatccggtttggtttctattatcggtgtggcacgtaaatccttataacggtggttactatctgtgtcatcattaaaataatgtattaaatctttaatttgcgttaagtagtcaggttgctctgatttaaattcatttagtgcttgattgacatttttataacttggagaatgaccagtacctatgtttacacggttaggatggcgtgcttccataactttaaatatttcagcgactttataggcactatagtgaggcaacatgataccgccactgccaattttaatcgatgtcgtattttctaataaagacatcattagcatttcaggtgcgctagaagcaacagacaatacttggtgatgttctgcaatccaataacgttgataacctaattgttcggataattgtgctaaagctacagcgtgattgattgcgtctgttgcactacgtccttcaaatattggaacataatctaatatacttagtttcacaatagatttccccaatcttcaatattaagtttaatttgtataatatagccaaatcataacatgagcggataaggttaaataagcgatttgattgatagaacaaaactatctctatagaatataagaaaagagtgaatggaggcaatataatgaaaacagaaagaatcgtattagccaaaagaccagaaggtattccttctaatgatgtattcaagtatgaaacagttgaagttggtatgccagatagtgaagaaatacaaattgagacgctctatatttcagtagatccatacatgagaggtcgaatggatgatagtaaatcatatattacaccattccaattaaatgaaccaatgaatggtcacatcgttggtaaagtaactgaatccaatgcggatgggttcaataaaggtgacattgttacaggtactttcccttggcaaaaagttgtgaatgtaaaagcaaagcatgccattaaggttacgcaaacgaatatccctttatatttatatctaagtgtactaggtatgacgggacaaacggcatatcatggtttattaaaaattggacaaccccaagaaggagaaacggttgtagtatcagccgcttcaggtgcggtaggttcagtagtgggtcagatagctaaattaaaaggcgcacacgtagtggggattgctggtggcaaagaaaaaacgaactacttaactgactctttaggatttgatgaggctgttgactataaagcagataacttttcagaagcactgtccaaagcagtacctaatggtgtagatgtttactttgaaaatgttggcggtactgtcggagatgaagtaatgaaacacttaaatcaatttgcacgtatacctgtgtgcggtgctatttcaggttacaataatacagaaatagaatatggcccacgtattcagccaattattattaaatcacaggccttaatgcaaggctttatcgtggcaaattatgccgatgattttgctaatgcaagtaaagaacttgcgcaatgggtacaagaagataagattaaaacaaaaacttcagtaatggaaggattcgacaatgtaccagaagcctttagaaacttatttacaggtgataactttggtaaacaagtcgttcaagtttcggataataactaattattaaggagatgcatgttatgaaagcgattggtgcagataaaaattttaatttagatgaaggtaatttattttacgagtttgatactgaaacgccacaaccaaagcaatatgaattactggttcgtgttaaaacaatcagtgtgaatccggtagatacaaaaataagaaaaacaccagtagagcatgcaccacgcatattgggctatgatggtgtaggtattgttgaggcggtaggaccagatgtaagccattttaatgttggtgatgaggtatattattctggatctccaaaatatcaagggtctaaccaagttttgcaattagtagatgaacgattagtagctaaaaaaccaaagaatatatcaaatgtggaagcggcaagcttgcctttaacaggacttacagcatatgaaacattatttgatgcttttaaaatttcatttaatccagaagaaaacaaaggtaaatctatcttaattattaatggtgcaggcggtgtaggaagtatcgctacgcaaatcgcaaagcattacggtttaaatgttattacaacagcatcacgtgaagaaacaattaattggtccaaagatatggatgcagacattgtgcttaaccataaaaatgatttagctgaagaattcaagaaatatgaaataagtgaagtagattatatcttctgtacatttgatacggatatgtactatgaaaagatgattgaattagtaaaacctagaggcacgatagttacgattgtagcctttaacaataagcaagatttaaacttactcaaacctaaaagtattacattcacacatgaattcatgtcagcccgtccaattcatgaaacagaagatatgcaaatacatcgtgattatttaacagatataactgaaaaaatcgaagcgggtatttataaaccaactgttacagaagtgattgaaggtttaactgtcgatcatttatacgaggcgcatgttaaacttgaaaaccaaggaatgataggcaaactggttattaaactataagtgtaaacaaagtcattttatttaaacatgcaatataaacgtattataaacatcttttaaattaggccacttagcaatggttaatttaaaagatgtttttttaattttgaagcgtgattattaatatttaattatctgtaacactgttcgctgtatacgaatatattcaaaaagatagggtatgtatcatacataaagtatagggagtgtgtaaatttgatatgcgtctaaataaattaacagtggtattttgggtagcattactaatctgtacgctatttgtggtgtatggtgcagttttacctaagcaacttgaaatggttacgcaaaatattacgaattttattgcagtcaattttggctggtattatttattacttgtattatttattttgattgtttgtgtttatttattattttcagaggtattcatctattactttaggggaagaaggagaagatcctgaattctctttaaatcatggtttgccatgttatttagtgcgggtatgggtatcgggttagtattttggacaactgcagaacctattaggcatgcattcacttttacaacgttaacataatggaggtacacaaaccgccataaatgaagctatgcaattctcatttttccattggggcgttcatgcttgggctgtatatggcatagttggacttgtatttgcttattttaattttcataaaggttatccaggtttagtaagtgctacactaacacctattttaggaactaaaatgatgagaggacctataggtggttcgatagatgtcttagctatcattgccacagttacaggtgtagcagcaacattgggatttggtgctttacaaatcaatgaaggcttgcatttcttattcgatattccgtcgaattttgtaacacaagtcattattattgtgatagcaaccgtattattcacatggtcagcgtggtctggtattgataaagggatcaaaaatctaagtaatataaatatgattttagcttttattgtattacttgttctattttgtgtcggaccaacattgaatattttaaatacgtttaccaattcattgggagactatattgcgaatttctttaatatgagtttacgtatcccacaagcaggcggagaaaaattccaatggctacaacaatggacgatattctattgggcatggtggatttcatgggcaccatttgtaggtatatttattgcacgtgtttctagaggtagaacgattaaagaatttatactgggggtactatttgtaccagcagttgtttgtttcttattttttgcagtctttggtgcgtctgccatctatttacaacaaaatggaattgccaatattgcaaaagaagcaaccgaaacagcgacatttgcgacgttagaacattttccattagggtttgtactcagtatagtgacattagtcattattatgattttctttgtaacttcagctgactcagctacgtatgttttaggtatgcttagttcgaagggcagtatcaatccttcaggttttgttaaagtaagttggggcattattttagcattattcgctatgattatgatctatactggcggcacgcaatctattcagaacttattaatcatcgcagccttgccattctcgattgttattatatttatgatttggtcactttttaaatcattatctattgaaaaaccaaggcctagtaataaattaatgatttcagatgataagcttttacaatatcgtaaagcaaatcaggaagataaatttgaacaaaatagtaaataagcaaaatttaatagtgagtcccaatttgttttgccaaaattgttaaaaataaaattcaataaaaatgtttctaagaatttttttaagggtatttattctgtatgacaagtacatattatcaaagcataggaggtgtcatacgaggtgaaacgacttaagaattttatccttggccttttaatcgtagtaattgttggctttttactctttatgtatattaaagattccagaataactcagtatcaagattattttactcagtttaactggtttgaaccaacacttattggattagccgcattacttattattattggtctcattttagtattcagcttgtttaaacctacgtatagaaaacctggactttataaagattttgaagatggtcatatttatgtgtctagaaaagcggttgaaaaatcagcttacgatacacttacacaatatgatcaaatacgtcaaccaaacgtcattgctaaactttataacaagaagaagaaatctcacattgctttaaaagcagatttctttgttcctggcgatgttcaggttaaatctttaacagaagaaattagaaatgacatcaagcaaaatgttgagcattttacagaactacctgtttctaaattagaggttaacgttagagatcaaaaaacttcaggcaaacgtgtgttgtaagggagggttatcatggctaacaataataaccaaaatggacaagattctacacaagaagtggttgattttttcaaaacttttaaatggagaattatcggcttcttggcattcttaatcattgcgattttattcctaactttaggtttttggagtacaattttaattttagtattatgtttgattggaataggaatcgggtatactaaagaccgtaagcaagactttttaaatttccttaatcgatggagttaatcgattaaaatgatgtaacaaagtagtagtgattattaagtatttataaaataaattttatttaacaaagtagtagtgattattaagtatttataaaataaattttatttgacaaaggagaatgtattatggcagtagataacaacaaagctaaacaagcttatgacaaccaaacaggtgtaaatgagaaagaacaagaacaaagacaagagcaacaaaatcaacaacctgagttcactaataaattatcattttctgatgaagtaattgaaaaaattgctggtattgcagcacgtgaagttagtggtattttagaaatgaaaggcggatttgtcgacaacatttctagctcattcggtagcaacaacaatgtatcacaaggcgttagtgttgaagttggtgaaaaacaagctgctgttgacttaaaagttgttttagaatatggcgaatcagctccaaaaatcttccgtaaagtaactgacttagttaaagaacaagttaaatatattactggtcttgacgtagttgaagttaacatgcgcgttgaagatgtaatgactaaaaaagaatggtctcaaaaaaatgaaaaaagccaaagctcaaacaatgaggacaaaggtttacaataattaattgagaatctaataaaagtaccgataaagcctaggctttatcggtacttttttcgtatttaaaattaatataaacgcattcattcaatctatttttactttaatctagcggacggtaaagtgggttatcgactttgatgtacgtataatagtctgcttcatcttctaatctcattgtcgttacacatttataatcaattttcgaagcaaataaaatggattcaattgatttgattctagtcgtattatccatagtttgtgagattacttgaagtttttcatgaagcatattgctaatcatagaccaaattgaagtctccaagtctttactttcactagcctgagctatggatacgatgagttcaccgagatgattttggatacttgaatagaagactttgttaaatacggtttgagattgatcagttaatattaatgacttttcatgaaatgtatcggtagaataacccatgctatttagatagtactcatcaatacgtaatccctcaaaatccctaatatagagcttatctatagaaccatcatgtttaaatgtcgcaattgaattttgtaagtgagcttctaaagcgatgccatattttacatataacggtaatgctaaatctattaatgcttgagcatacgattgcatccattggatactcgcctcatcataactctcgaattgatgtgcttttttgtattttttaattaatgtccatataggtgtttcactattattgatatagttagcaacaagacttgatggaatcatcggtatggtattgctttgaatagatttataaatgttttcacgaaatagtgtacctaattgttcacttttaatggtttgtatcgattcggcgtcttgcggattataaaaatgtatacctgcgagctcatcaatcgtatctgccttaatatttttaaagagactatctgtgcttttaatattatttaatattcttgtaacttgtggcccattaattgttgtctgttcagataaagtacgaatttcaccagtaatgtgaacattagtggataacttgatatgtggtaatgtttctggtaattcaggcatcagcgttctaaatgataaacctgcaaaataatctaattcgtagtcaacagggataatgagtcctttttcaagttcttgaatataatcttgttttaaaatttcatcatattgccatggatgtacagccatcgcgtagtaattatcaactttgtcattactgagtattttaactgctgaatcatgtaaaccatcaaagcaattgtagactaagtcattataattattatttaaagcatgtgttttagcgatatttttatgaattaatataaattgcaatttgatgttatttgcaaattcagaagaataagcaattgcagtttcaggtgtcatacctttacgtaatttggcacctggatgtaatggatgaccttcgacaactgcttgctcagaccttaaatacggatcggccgatgcgtaaatgagttcacacaatggttcgctatcatcagtcagtgtatacgcctgataacttaatgctatggccatattagctacgctattatccatatcttctttgaactgcatacttgcctcattatctaagtgaggtgcttctaataaaatacacgataatatttcacttggatgtaatatacgatgatattcattattttgttcaaaataaaatggccctgtcacattaattctgtcgaaggcatgttgtcctaaaataggtgcatataactttatttgtgcatgtgggaatgaaattgttaatactttcgtatgtggtgtggctattgtgaaagataactgtttagtatcaatgatttcactgtaatctcggcaattaactaaattctcccgatgcattgaagttatcaatctttgtgaaattttatctcgactttctattaatatagaattaaatgcctctgcccaagtagggtttacagattgtatataagacagcgcatattgttcatcattagtaagtttattaattaaattgttgtcgtttattttggaattcataatgcacctctaaaaaaattattttacaaacgtataagatatttgtataatccatattatcgataatgataattattatcaattaaaaacaggaggaattacatggcaaagtatttttttccaagttcattcttactgtttttagggaactggattggacaaattacgctgaattggtatgtatttactttatatcataacgcaatttatctcggattaattaattttttccgactcgtacccattttgctcataagtgtatgggcgggcagtttggcagataaatatgaaaaaggtaatcttttaaaaataactgtatcagcgtcttgcatattaactactatactatgtattttaacatttcaacatgcaaaactacctattgttgtatttttaatttatgcgcttgggcggggaataatgagcgctatagaaacaccagtacgtcaagcagtgctaccagatttaactcaaagattaacgacgactcaggctgttgcttatcactcatttattattaatatttgtagatcgattggacccgccatcgcaggttttatcatggctacttacaatgcagaaataagttttggcgttcaagcgttttgctatcttgtatcactcatactttgtttgccattgaactttagtgagcatataatagctaaggaaaatacagatgtaagcataaaatatgtgatgacatattttaaagaaaatttagaaggatctagaatctttgtgacgtcattattgattatggcaactggatttacctatacaacgttattaccagtattaacggataaaacatttcccaaccaagtgactatttttgggagtgctatgacgtgttgtgcgataggtggtattattgcaaccatgattttacctaatattttagagaaagtatcaatggtgaaaatgtattacgtgagttcgattttattcggagtatcactgctttgtacaattagcagtcaaatttggttgttatttacatctatattctttataggtctttttagccaatgggcacgcactacaaatagaatttacttccaacatagagtgaaagcagaacatagaggtaaaatactcagcgtcgtaatgatggacagagggatgattcctttaggcgcaatggtcatgagtttcttggcagaatttatcgggattattgaaactttcgtcatcatgggtataagtacatttatcatcgcattcgtatttagtgtgattagtagacaaagaaaaaatggaggcagtattgtatgatgcatcaaacgtggcagttagcagatagaaatgtacaatatcgtatttttaatgcaattattaaagaacaaatttttcctgaaaacatgttttttaacgagtatgagcattttgttgaattgcaaattcatggccaagtgttgaaattacaaaaatctagaaaaagtgctatggaaagatatgaattttatggtgctatctcctatatcaaaagtaaagtagagactgagattgcttcattagaacaacttttaactgtactggatactcattttgatattccaattagtcaaagattaactgaagaattgctatccagtagagaagggttcgcattaacgtatgaacactttaatcatagacaatcgctaattcatgcaacacttaaattttcaaaaatgcctgaaacaattaatttcttttcatggcttcaacatatggcagatactgaacaaattaatgacttaagttattcagaaagtcttgtcatcgaaggtcatccaacacaccctttatcaaagacgaagttacctttatcagaagcagagattaaacaatatgcaccagaatttgaaaaaataattggtttgccaatcatgcttatacataaacaacattgtgtcataacatctatggaaaacgatacggacttcattttagatgagattgttcctgaatatcgttataaattaaaagccttcttggatgttcacgacttggaattaaatgattatagtttaatgtttgtacacccttggcagtatgaaaaggttattccgcatcaatttgcagaatggattgaatctaagtatttattaccaacaccttttgaagttgaagcaaaagcaacactatcatttagaacgatgcaattaatagggaaaccttaccatatcaagttaccagttgatgtacaaaccacaagtgcagtacgtacagtgtctagtgtgacaacggtagatgggcctaaactcagttatgaattacaggatatgctagatatatatcctcaactgcatgtttctatggagccgtttggtattcatgctaagacggagcctgatattgcacgtcatttggcttgtattgtcagacatcaaccctatttggctgataatggtacaactatagtgacagcgagtttagtcaatagaaatccagttgataaccaaataacagtagatagttatttgaattggattaatgatgaaattacagaggatacgattaagaaatttctcagtgtttataccaaaacattgattgatcctttagtagcctatatacaagattatggtattgcgttagaagcacatatgcaaaatacaattgttaatttaggtcctaattatcaaatgcaatttattattagagatttaggtggttcaagaattgatttatcaacattacaacaaaaattgcccaatatcacgcttacaaataaaagtttaatagcagaaaatatagaatcagtcattgctaaatttcaacatgctgtaattcaaaatcaaattgcggaactgattcatcatttttctcaatatgatggggttgaagaaacacagctatttgagattgtaagtgaaattgtagaacaagcaattgatccccataaaccacatgcccaaaaattaagaaatgtgctatttgggccgacaattactgttaaagctttattaagaatgagaatggaaagcaaagtgaaacaatatgtaacaatagatttgaggaatccgatatataaagaggtgtaacgtatggcgcaagtaaaaataaatttatcaaaaataaaatacaatgctcaagtgctatcgtctatttttaatcaaaatcatatacgatttacagccgtaattaagtgtgttggtggtgataatagaattgtagaaacactcaaagaaatcggattgacacactttgcagatgcccgtattgagaacattactaaaagtaaaaatgaagatctatcttttatgatgattaggacgccaagtcgaagcgaattaaacgatgtcgtgcagcaaacggatatcagtatccaaactgaaataacaacgattcgacgattaaatgatatcgctagggaaaaaggtacgaaacataaaatattgttgatggtagattggaaagacggccgagagggcattcttacttatgacatcattgattatattaatgaaatcttgtacatgcaccatgtgtccatcgttggtcttgcgtttaattttatgtgttttcaatcagtcatacctacagaagaagatgtggctttaatcaatcaatttgtagattcagtggaacgtgagacaaatatgaaattttcaattatttcaggtggcaattcgagtatgattccccaaatgctttatagagattttggcagaattaatgagttaagaataggtgaaactttatttagaggtgtagaaacaacaacaaatcaatccatagcttctttatatcaaaatgcaataaccttagaagcggaaattgtagaaattaaacctcgaatgaatattgctaccggacatcaatacttacaagcgattgtggatataggaaatttagatacagctgttgaagatatccaaccgttacatcaccatataagcattgcaggtgctacgagtgatcatgtcatgcttgatttattgaatcaagattactatcaagtaggtgataaaatacaattcagtttaggttataaagcattagcccatagtatgtatatggttaatttaaaaaaagcttatcatcacgatgatatcatagaaaatttgtgtaacaattttaatgttgaaaaatcaaatcgtttttaagctttaataaaaagactaaaagtttttattgacaccgataatcattatcaatagaattaaatatgtaattatacatatctaaggagggaaaacgatgaaacatagttataaaattatgggtatcctgtttttaactttaacactagtcatactggctgcctgtggtagtgtcagtgataatgattcgagtaaatcggataaaggtgatgacaataaagatggtgtgacgattaaacatgatggaggtactactaaagttgccaaagatcctaaacgtgttgttgcacttgaattctcatttgttgatgcattagctgctttaaatgtgaaaccagtaggcgtagctgatgatggtgacaagaatagaattttggaaccaatacgaaaagaaattggtgattatacatctgtaggcgcacgtaaacaaccgaacttagaagaaatcagcaaccaaaaaccggatgtcattattgcagatacgaatagacataaaggtattcaaaaagatttacgaaaaaattgcaccaacgattatgttaccaagctttgatagtgattataaagataatatagaagcctttaaaacaattgctaaagcagtcggtaaagaagataaaggtaaagaaagacttaaagaacacgatgaattaatggataaatatagtaaagaaattactatggataaaaaacaacccgtgttacctgcagtagtagcgaaatcaggattacttgcacatcctgaaaacacatacgtaggtcaattattaaaagaattaggctttaataatgcattaaataaaacaaaaacagataacttatctaaatacttaaaaggaccttacttacaattaaatgccgaagtattgtcagatattaatcctggacgtatgtttattatggcagacaaaggtgaaaacgatccaaatcttaaaaaacaagaaaataatccagtttggcaagatttagatgcagtgaaaaataatcgtgtttctgtagtagatcgaaatacatgggcacgtgcacgtggcattatttcttctgaggaaattgctaagcaactagtagatatttctaaagaggaaaaaaaggataatcaacaaaagtagggtgacaggtaaatgactaaatcaaatagcattgacccaaccaaattaatagagaaaaaaacaaaaaaacgcacagcactcacatttattgtgagtgtgtgtgcgctttttgtcattatatacttcaatttaagtgtagggtcgtcgcatattacgtttaacgatttcatggattacatatggcatcataccgacacaaaacaaacatttttaatacataatgtgcgtatgccacgcatgttggcagccttattcattggtgctgccctgggtgtagcaggtctgttaatgcaggcaatgacgagaaacccattggcatcacctcaaatttttggcgtgaatgccggtgcttcatttgttatcgtctttatcactatgattgtacctgctttatctgaatacgcaaccatacttgcatttgtaggcgcatttataggcggacttacagtatattttctatctggatccactaagggcatgacgccagttaaactagcactagctggtatggcaatccatctatttttttctagcttgactcaaggcattatccttttaaatgaagatgcaacttcaacggtaatgttttggcttgtgggttcattatctacaatacaatggccacaaattataggtgtcataccatggtttgtgctcgcatttataggggccattgcgattgctaagcaactaacaatcatggaacttggtgaagatttagctacgtctttaggacaaaatgttaaattagtaagaatagccactggtttattggtcattgtacttgcaggggcatccgtttcaattgcaggaccaattggatttgtaggattaattgtacctcatattgtaaaacactatatacgtgcagattatagattaatggttccactgacaatggtgattggtgcagatttactattgttatctgatgttttaagtcgattaattgcttttccatttgaatcaccagttggtatcgtgacttcatttgtaggcgcactatacttcttattaataacaattaaaggagtcgatagattatgatgggtaaattaactttgcgttatagcatcgtaacagttttgttaataatttctgcaatcgcatcattgtctatcggtgctgtatttatgaatccaattgaagcggttaaaagtttatttaatcatgataattttattttaaatgaatatagaatacctcgaatgtttctagcaataattgttggtagtagtttagcaatatctggctcattgatacaaggtgtcgtgagaaatgccctagcgtctccagatgttattggtattacaaaaggtgccagtttatctgctgtaacaattattatgttgtttccttctgcaccgttgtttatactaccttttggttcgtttgcaggagcattgtgtattagtatcatattaactgtattgatatctaagtttaatgttcaaggctcaaaacttgcacttataggtttagcaattggtgcgatttgtacagcaattgtgcaatatttattaattcgaaatccaatggatgcaaatacggcattagtttggttaacaggtagtttgtatggtcacagtatgatgaatgtttgggttattttgccttggtttatcatcgcacttccgattattctatattattgtcatcaactcgatattttgtcattaggtgatgatattgcaacggcattagggacaaaagtgaaaaaaattaaaatgattcttctattattagctgtcattttagccggtgcatctatttcaattgtgggtggattgagttttctaggattgatagcgccgcatattgcaagaagaattgtaggtcataaacacattcatattacgctaatgtcagggttgattggggctttactcctttcaatcagtgattgcattgcaagaggcgtccatccgccccttgatattccagtaggggtgattgtggcaattgtaggtgtaccatactttttatttttattaagaaaaatttaatttaaattaagtaaagaaataggatgtaaattgcaaaagtaatcgctttcatttaaagtagaattaattctatgcttatagaatcgattctacttttttaaaatgacagtaaatagacaaaaattaccgatttacatatttatacattatacgttataattatagctgttgtttttaaaaataaaatcaaattaatacacctaaggggtgaatagagtgaatcaatatagtaaagcccagattgtacgtggtcgacttaagtttattatcatgtctttaattggcataattttattcttaatgccaataagcgtgactgaagatggtgaaaaacaaacaactttacctgttgcatttttagctggacttttgaaagacactatcggaggtgcaatgcctttaattattgtgattattattacactatcaggcattttatctgtattatgttctatagtactgaaaaataaattagcaccggaaggattaatgtacaacgcatttaatgttaaaatcggatggctcattttgagaatattagcagttgtatttgtatggattacatatttaaaagtcggcactgaagtcatatattctgcagacacaggtggtcttgtatttgaaagtttactaccgacgttggttacggtatttttctttgctgcactattcttaccattgcttatggaatatggattattggaattactaggaccagtatttagacctattatgagaccgttattcacattgccgggtcgttctacagtagataatttagcatcttttattggtgatggtacggtaggtgtcttaattacaagtagacaatatgaagaaggattctactcaagacgtgaagcaacagtgattgcaactacatttagtgttgtatctcttacctttgcaattgttgttgcagaaactgtgcacatgcaaaaccatttcttctatttttatttaacggttattatttcttgtttagtgtgtgcatttattttaccaaggatttggcctttaaaatctattaaagatgaatatgcaaaagaagtttctgaggaaatgagaactgagcagctaccagaaaacaaaacgccattaagacatggatttgacatggctacagaaactggtattaaagcacctggttttagattatttttcaaatcaggttttaaaacagtgattgatatgtggttcgttattttgccagtagtcatgagtgtagggacattagctacaattatcgcgacatatacgcctttattttcaattattggtaaaccatttgtaccatttttagaattactacaaattcctgaagctgtacaagcctcagagactgtattaattggatttgccgatatgtttttaccatctattttaattgaaggtgtaggtaatgatattactttatttgtagttggtgcattaagtattactcaattaatatacttatcagaagtaggcggtgtgatcttaggatcaaagatacctgtgagtatttttaagcttttcgttattttcttaattagaacgatcattgcgttacctattatttcattgatggcacatttatatttcaattaataggcgcctttacagattaaatatcacattgtattactaaagtattgtcatacaaaaagccataaagcaatctatcaatatagatactttatggctatttttaatttgtcatataatgtatgaactgtaaaaactaccggtactggtatcgctaatataacgtcagagttatgagagctctgaaatcacatttgctttaactactttattacctaggataggtgaatcgtcacttttagtttttgatttaccttcatgtgcttctttgaaagcatcgctcttcaaccaacctttaaagtcatcttcagaatcccaccaagtattgatatacatttgatcgtaatctgcttcatcatcaataagccaaacttcaactttttggaaaccttctaattcttggattttaccaccttgagtaaactttggtgccattttttctgcgaagccttttttaacatcgattcgatttgttacaacgtacatgctgcgcaccttctttcattaatataaatatattatagcattgttgatttaagaaggtaattgagaacgcttattaatagcgagcagattacaattgaaaggcagtaaatggttcaagctatttatagcaaagtgaaaatctcattaggtcatttgttatacctctttttattaattttatttaagtgaagttattgtatgaattacttggtaacttcattataaactttttgatcattttgcgtataaataatgtattcatggtcatcagtatcgatgataacgcggttcgtttttccaaatgtagaaccgattctcgaaactttatctctatcgagttttggtacttcatggatattttgatcttgtgaaatgttcttaatttcacttgttggaattttgatatctgcaactctccactgaattcttacttcattgttatctttttttactgtcattgccataactcgaacacatcctttaaataatttgtagatatatcatacaatatattgcaatcgttttcaagagattgtgtgatactttttcaaaaaaggttatactcatatgttttttacgaaagtatgttcgcattaatcgtgtgattatgctaaaatattaatgttaaggagaagtgaaaatgacaggtaaaacacatgcatcatgcagcttattagtcggggctttaactatagaatattttca

SEQ ID NO: 56 - DNA, 20818 bp, Staphylococcus saprophyticus
tacagcatttttacatcctagagatttaggatatataaaaaacatttcggtgaaaattttatggaaattccaagatttaagaaaatgattgatttcgctaatggtaaagtgacagttaataaaaatagacaaaaagtgacattcgaaaatgctgaacttaatcctgcgactgcgcgaccttattttggaaatcctgaaattgcagatatcgttatattaaaaaaacaacccgaaaatgattttaaaatatacgaactcagtttgcctgaagctgaagcaatagagtatagaaaaaggatcttgttagatattcaaggtaaattaacatttgatggtcaaaaattatttttaccttatattgattgccatagatggtttgtaaaatatttatatagtaatgcgtcaactttaaaatactttaatattgaccctaatcgtttaatggttattaaatttttcccttatcaaacaggtcatgcagcaggtataccgaaagatttcttatcatttaaatatatacttccttcccagaggcaaaattttaacttgttaattaaaatgctaaaagatgataaaaaacgaatttatatcgtaagtgaggaagaattatatatatccattttcaaaaattttgcggatagtgatatttgtgaatatttaattgaaaacctatttgtattatcttctaaacaaaatagacatcttacgttatgtaacgtattgagttataaagagcatagggaacgtctgagaaaaaaacaagcgttatcaaaaattgagtattacaaatggaatcaagaacaaaaggctgcacgcgaaaatggtgattctgattttcacaagaaaatggattctatgagatatgaattttctaattctaactaataaataaaaaagcttatagtatgtgtgtctcactaactgtaagctttttttaaatgtcgtaattattgaataaaacttgtatttttcttttaaattcatcgacataggattgtggttgtagaagtatgatagcctgaggatatagatacgctaaatgcatactttcttcttttgaaataattaggttaacgatagtcccatctgctgaaggagtagtatctaagataatgaattgtctctttatttctggccaaatatcatctttcactagcagtttcacttgtttaatatgattaaagatatcgcgttcaaatacttgatttgttagtttaatatctgtaattgttgttaaatcacgcgtatatatttcttcctcatataagtacgtaatccaatacacgttatcaaaatagcgcgtataaattggaatgatgttagggagctcgacattatcaagttgtatagtgagtttatgattattctcgattgcaagttgaattttatagattaaagtagactcattgagttcacgatgtattttgaattggcttaataatttattagataataatttttctgctagatttgaattagcattcaaaccacgaatgagattatatgtatcttcatgaataaccggggtgaaatctttcattcgaaaaataagatttagcaatctattttttttaaaatttataactatcaatctttaagcgatgtttttcaattgtagtatcgtatattactttgccttcaagaccatgccattcatgatcttcataaataaattatttatatcactaatgtctctttgaatcgtacgtatattaacttgtagtttttgtgataaggcttctttgcttatcgttttaccatttagtaatcgggtgtaaatatagagcagacgttctggtttttccaaaaaagatgcaactcctaaagttttaaaatcaaatcaattataatatcgattagttttatagtatagcactatatttttataaatgtgtaaaatcattatgaattgacgtactaaagttgatggctttgatgaaaaacacatgccatttacacttaagcataaaaattcatcgcttaggcaatttaaatatagaattatagcgttcttatgaaataatgtttcaaaaattaacagttaggaattaaaattatgctcaactgtcatataatatgttgtatttatatatgacatgcaatatattgtaatgacaaacataactctactgattcgataaaagggaatacaaagtaataatatttgtttgacgtcatgaaataaactgtcatataatttgttagtaaggaaacaattgacgaagtaagatatatgtgaggtgaaaaatatgaatatgagagcagaacgtgtaggcgaacaaatgaaacaagaaatcatggatatcgctaataataaagttaaggatccaagaattggttttttaacaattactgacgtacaattaaccaatgatttatctattgcaacggtttatttaactgttttaggtaatgaaaaacaaaaagcagataccttcaaaggcttagaaaaagctaaaggctttataaaatctgaattaggctctagaatgagactccgtatcattccagaattgaattttgaatatgatgaatcgattgattatggtaataaaatcgaaagaatgattcaggatttgcataaaaaagactaaatattaattaacatgtctttgattcaatatgaagtggacagttgattaatatattattacattctatttagctcaatatttgaatttagattgtagattcttagtgtaggagcgagaacttgaaatcgaatagatttcagtctcgctcttttttacataaacgcgtaaatcaatacatgttagtatagtatatataataaaaatgagactctgaaggtgaattgaaaatgtataatgggattttaccggtgtttaaagatcgtggattaacaagtcatgatgttgtattcaagttgaggaaaattttaaaaacgaaaaaggttggtcacacgggtacgctagacccagaagtttcaggtgttctaccaatttgtattggcagtgctacgaaagtgagtgactacattatggaaatgggtaaaacttataaagctacagttagtttgggcataacaacgacgactgaagatcaaactggagaaatattagaacaaacagctgttaatgaacaagatgtttctgctaagtcgatagatgatgttttacaacaatttaaaggtgagctgatacaaattccaccaatgtattcttccgtaaaagtaaatggtaagaaactatatgaatatgcaagaaacaatcaagtagttgaaagaccagagcgaaaggtcaacatttatcaaattaatcgaatttcagatttgcgttttgtagacgatacttgtcaatttgatatgatagttgaatgtggtaaaggtacatatattagaacacttgccacagatattggtaaagcacttgggctacctgcacatatgtcaaaattaacacgtacgcaaagtggtggatttgatatcaatgagagtctaacacttgaagatataaagtcactgcatgagcatgacacgttacttgagaaattatttcctatagaatatggtttgaaaggtattgaacaaattttaattactgataacgccattaaaggaaaaatattaaatggacaaaagttttacaaagctgagttcaagcaaaatatagacgacatcgttataatggtagataatgaaacacataaagtgttagcaatttatgaaccacacccagaaaaacttgatgaaattaaacctaaaaaagtgtttaactaaaggagtcatacacatgaaagtgatagaagtagctcatccaattcaagataatcaatatataacagaagcggttgcgatggctttcggattttttgacggtatgcataaaggtcatgcaaaagtatttgaaacattagatgccaaagcaaaatcccaaaatttaaaaaaagcagtcatgacatttgatccgcacccttcagttgtattaaatcctaaattaaagagaacagattatttaacaccaattcaggataaggtggaaattttagagtcatatggtatagattattgtatcgttattaatttttcatctaagtttgctgaagttacggctgaagaatttattcaggattatattatcaaaaataatgtaaaagaagtgattgctggctttgactttacatttggtaaattcggtaaagggaacatgatgattcttgatgaaatgtctgagtttaatacaacagttgtgagtaaacaagagattgagtcagaaaaaatatctacaacagatattagaaaatcgcttaaaacaggcgatttgcagaaggccaatgaagaattaggttaccgataccgtattaaaggtacagttgttcagggtgaaaaacgagggagaacaattggtttccctacggctaatgtgcaaccgagtggtgattatgtattgccgaaaaatggcgtttatgctgtcagcatggaaattggtgtaaacaaagaaacatatcgaggcgtagccaatgttggggttaaaccgacgtttcatgatccttccaaagcacaagtagttattgaagtgaatttattcgactttagtgaaaatatttatggtgaacgtgtaaccgtatattggcatcactatttaagaccagaaattaaatttgatggaatagatcctttagttgaacagatgaacaaagataaagaaaaagcaaaatatctattatcggttgattttggtgatgaagtatcatataatatttaagtcgaatgtgtaatccacatttatgcacctttaccttggcagctcgagactccgacgttttgctcggataaaggcgaataaaaattaaaaggaggaaattgacaatggcaatttcacaagaacgcaaaaatgaactaattaaagaatatcgtacacacgaagcagacactggttctccagaagtccaaatcgctgtattaactgcagaaatcactgcgttaaacgaacatttacgtgaacacaaaaaagatcatcattcacgtcgcggattattaaaaatggtaggtcgtcgtagacacttacttaactatttacgtgacaaagatgttcaacgttaccgtgaattaattaaatcattaggtatccgtcgttaattttaagacgtttattgatagggaaagaacctttagggtcctttcccttttttataatttagaacagctattttttaaaaaggaatatactaatataaaattattctaagaaatgatatgatagaactaatagatatatgagaggagattcgtaatgtctcaagagaaaaaagtttttaaaaccgaatgggcaaacagatcattaacgattgaaacaggtcaacttgctaaacaagctaatggtgccgtactcgttcgttatggtgatacagtagttttatctactgcagtagcttcaaaagaaccacgtgatggtgactttttcccattaatggttaactatgaagaaaaaatgtatgcagctggtaaaattccaggtggatttaagaaacgtgaaggtcgtccaagcgatgaagcaacgttaactgcacgattaattgatagaccaatccgcccattgttccctaaaggttataagtatgatgttcaaataatgaatactgtacttagtgctgatccagattgttcaccagaaatggcagctatgataggttcatctatggcattgagtgtttctgacattccattccaagggcctattgccggtgtgaacgtgggatatattgatggtgaatacgtaatcaatccaacggtagcacaaaaagaagtgtcgcgtttagacctagaagttgctggtcataaagatgcagtgaacatggttgaagcgggcgctagcgaaattactgagagtgaaatgctagaagctattttctttggacatagcgaaattcaacgattggttaatttccaacaagaaattgttgatcatatccaaccaaagaaaaaagcattcgttcctgtagaaaaagatgaagtattagttgaaaaagttaaacaactaacacaagagaacggtttaaaagatgctgttttaacatttgataaacaacaacgtgatatcaatttagatgcgctcaaagaaaaagtagcagctgaatttattgatgaagaagacgcagataacgaagtgttaattaaagaagtgaatagtatattaaatgacttagtcaaagaggaagttagacgtttaattgctgaagaaaaaatcagacctgatggccgtaaaacagatgaaattcgtccattagaatcagaagtaggtgtcttacctagagcgcatggttctggtttgtttacacgtggtcaaacacaagcactatctgtcctaactttaggttcaatgagtgaatatcaaatcctagacggtttaggggaagaagaacagaaacgtttcatgcatcattataacttcccaaactactcagtaggtgaaacgggtcctgttcgttccccaggtcgtcgtgaaattggtcatggtgcattaggtgaacgtgcattgagccatattataccggatttgaaagacttcccatatactgtaagaattgtaagtgaagtattagaatccaatggttcgtcttcacaggcatcaatttgtgggtctacattagcattaatggatgctggtgtgccgattaaagcacctgttgcaggtattgctatgggcttagtgacacgtgatgatagttatacaatcttaacagacattcaaggtatggaagatgcactcggcgatatggactttaaagttgcaggtacagctgaaggtatcactgcaattcaaatggatattaaaattgatggtttaacaaaagaaattattaaagaagcgttagatcaagcacgtgaaggtcgtctagctatattagatcacatgctacaaactatcgatacgtctcgtagcgaattaagtgcttttgcacctaaagtagttacgatgacaattaaaccagagaaaattagagatgtcattggacctggtggtaaaaaaattaatgaaatcattgatgaaactggcgtgaaacttgatatcgaacaagatggtacgatctttattggtgcagttgataaagatgccatagcacgtgcacgttcaatcattgaagatattacacgtgaagcagaagttggacaagtttatgaaggtaaagtcaaacgtattgagaaatatggtgcgtttgttgaattattcccaggtaaagatgcacttgttcacatttcgcaaattgcgaatgaacgtattgataaagtcgaagatgttttaaaagtcggcgatattttcaaaatcaaagtaactgaaattgacaaacaaggtcgtgtcaatgcatcacataaagcattactataaattagagttttatcataaaattggtattgtaactataacgagagactagttaactgaatgtaacttcctacaatagcatgtcatcgattctattgttggaagtatcacattgcagtatttgctagtttctttttttatatatataaaaatgctaataaggaagtttgtaattataaatagtatataaacggaatttcagtttgtggaaaattttcaagtcgcattgtatattaagtcaatataaattgagtaattatagaattaaaatagatataaactatttgttgtaattactttaatagtgtacataaagcgcattttaacttataataaattatgagtttatatatggacggggaaattaaataggaggtaacattttgagtttaataaagaaaaaaaataaaaacattcgtatcattccactcggcggagttggagaaattgcgaaaaatatgtatatcgtcgaagtggacgatgaaatgtttatgcttgatgctggtttaatgttcccagaagacgaaatgctgggcgtagatattgttattccagatattcaatacgtaatagaaaataaagaaaaattaaaagggatctttctaacgcatggacacgaacatgctattggtgctgtaacgtatgtgttagaacaagttgatgctccggtatacggttcgaaattgacgattgctttaattaaagagaatatgaaagcacgcaatgttaataaaaaagttagatactacacagtgaataatgaatcagtgatgcgttttaaaggggtaaatgtcactttctttaatacgacgcacagtattccagatagtttaggtatttgtatctatacttcttatggcgcaattgtttatacgggtgaatttaaattcgaccaaagtttacatggacattatgcaccagatttgaagaaaatgactgagataggcgaagcgggggtgtttgctttaattagtgattcgactgaagctgaaaagccaggttataatacaccagaaaatgtgatcgaatcacatatgtacgatgcatttacaaaagtgaagggcagattaattgtatcttgttatgcttctaattttataagaattcaacaagtattaaatcttgcgcaaagattaaatagaaaagtgtcattcttaggacgttcacttgaaagctcatttaacattgctagaaaaatgggatattttgatatttcaaaagatttattaattccaatcaatgaagttgaaaattatcctaagaatgaagtgattatcatagccactggtatgcaaggtgaacctgttgaagcgcttagtcaaatggctcagaaaaagcataagataatgaatatcgaaccaggggactctgtctttttaactattacagcttctgccaatatggaagtgatagtaggtaatactttaaatgaattagtacgtgcaggtgctgaaattataccaaatagtaaaaaaattcatgcttctagtcatggttgcatggaagagttgaagatgatgattaacataatgaaaccagaatactttataccagtaaatggtgaatttaaaatgcaaatttctcatgctaaattagctaatgaagcaggtgtacaacctgaaaaaatcttccttgtagaaaaaggcgatgttgttaactacgatggtgaagaaatgattttaaatgaaaaagtaaattctggaaatgtacttattgatggtatcggtgtaggagatgtcggtaatatcgtattaagggatcgtcatttattagcggaagacggtatatttattgctgtggttacgcttgatccaaaaaatagaagaatagcggcaggtccagaaattcaatcaagaggtttcgtttatgtaagagaaagtgaagcacttttaaatgaagctgaagaaaaagtccgtgaaattgtcgaattaggtttacaagagaaacgcattgaatggtctgaaattaaacagagtatgcgtgatcaaattagtaaattattatttgaaaatacgaaacgtcgtccgatgattattccagttatttctgaaatttaataatttcaatactaaacaaagaggttaagacatacgcttaggtaaatatatttaaaagtagattaaggtgacatgttaagcaattttgccataaatccaacctttaaatgcactaagagcgaaaaaatgtcttacctcttttatgttattatgtaagaatgcgaaactttatttatacataaatattaataactatgagaaacttgcatatattttaaacgaaaatgttatatcacatatgtaggaattgaacatatgatgacgcatatttgaaaactgagtcgaaaagaaggtgttaaatttggcacaaacgaaaaaaagatcaacagctaagcgaaaacctgcaaatacaagaagaaagacatcgaataagaagaaacaacaaggtgatcatcccttaagatatatattggcaattgcaatttttgtcatcatcgtcttaggtgcttttcaacttggtatagtgggaacaatgattgatagtttctttaattatttatttggtaacagtagatttttaacttatatacttattttgattggaactatattcattacatattataaagcattacctaaaacgagacgtacagtgggtgccttcgtattacaattagctttattgctagttacacatattgttttttattttacaaacaaggtacaagcgcaacgggaaccagtattgtcatttgtatatagttcatataaacatacgaattttccgaattttggcggaggactcttaggtcattatttattatcgatatctataccgcttatttcaattgtaggtattattattgtcacaattttacttatagcttcaagtattattttacttttaaaacaaaagcaccgagatgtatctaaaatattatttgaaaagttaaaagttaaaagtcaggatgcttcagaaaattataaagaaaagcgcaaacaaaataaaatcaaaaaagaagcgaatgcacgcgtaaaagctgagaagaaagctgagcgtgagaaacaacaactagaagcgagtgagcaacaagacattaaagatgttagcgagctagaagaagtaccaaacgaaacaagtaaccaacaattatctatccctatatacggacatagtgaaaatgatgaagaatctacaaatcaaagtccaaatactaaaaaacaacgtactaaacgcatgtacgatcatgaagcggataatgttcaacatacagagcatgatacaaatgatgcggatttggcttcattagatcaatctatggatgctactgaagaaactgaagatagtcaaagcgatgcggttaactcgatttcagaagctggagaagtggaaaacgaggcatacacgattccaccactctcattacttaagcaaccagcgaaacaaaaagcaacttcaaaagcagaagttcagaaaaaggggcaactgctagaaacaacacttaaaaattttggtgtagatgctagagtgacacaaataaaaatcggtcctgcggtaacacaatatgaaattcaacctgcacaaggtgttaaagtaagtaaaattgtaaacttgcacaatgatatcgcacttgcacttgcagctaaggatattcgtattgaagcacctattccaggacgttctgcagtgggtattgaagtaccaaatgacaaaatttcacttgtatcacttaaagaagtattagatgagaagttccctgcaaaaaataaattagaagtaggattaggaagagatatctcaggtgatcctataacagttgaattaaataaaatgcctcatttacttgttgctggatctacaggtagtggtaaatccgtatgtatcaatggtattatcactagtattttacttaatgcaaagccgcatgaagtaaaacttatgttaattgatccgaaaatggtagaattgaatgtatataatgggattccccatttattgataccggtagttacaaatcctcataaggcatctcaagctttagaaaaagttgtggccgaaatggagcgtcgttatgatttattccaacattcatctacaagaaatatagaaggttacaacgaagcgattagaagacaaaatcttgagctagatgaaaaacaagctgaactaccttatatcgtggttattgtggatgaattagctgatttaatgatggttgctggtaaagaagtagaaaatgcaattcaaagaattactcaaatggctcgtgcagcaggcattcatttaatcattgcaacacaacgtccttctgtggatgtgattactggtttaatcaaaaataacattccaagtagaattgcttttgctgttagttcacaaacggattctagaacgattattgatagcggtggcgcagacaagctattaggaaaaggtgacatgctatatgttgcaaatggtggttctacaagaacgcgtgtgcagggtgcatttttaagcgatcaagaagtgcaagacattgttaattatgtagtagaacagcaaaaagcgaattatgttaaagaaatggaaccagacgcaccagtagaaaaatcagaaatgaagagtgaagatacgctttatgatgaagcatatttatttgtcattgaacaacaaaaagcgagtacttctttattacaaagacaatttagaattggttataatcgcgcttccagattaatggacgatttagaacgaaatcaagttattggaccacaaaaggaagtaaacctagacaaatattagtggatttagatagtgatgaggtgtaaaaatggaactgacttctgtttataaagttaaagagtggatgatacaacaaatcaaagatggcaaattacaacatggtgaaccattaccaagtaatttagcaatagctagaacattaaatgtaaagacagatgatgtctatgatgcagtagatgaattaatcactgaacaagttttatcaaataatttagaagaaggtgcacgtgttaaatcactgcacccattctattatcctttaggagaagttgtaagtataagtagaatgattgaagatcagggttatagtgctgggacagaatatattagttttgatgaaaaaccagcgacctcattagattcaaaacgattaaatattgcagataaggcaaacgttacaattatagaacgtgtcagaacggcaaataagaaacccgtagtatattgtttagataaagtgcctgcgagtgacttaacatgcgcacaatatcaaaatagcgatgaatcgctactaggtgctatcgaagcacatacgggaaaaaaagtggcatatgctgatactgaaatggaggccatcagttatgagccgcacatttcagacatcttaggtgcatcaccacatgaagggcttatgttattgaaattagtccattatgataaagatgaccaaccaatactttattcttttaattatttcaaaagtagtttagtaaaatttaaaacggttaaaaatagtttataataagaaatttatgaaagtgaggcatgacaatttgaagaacaaaaatactcagaatgacatacatattaaagtaatgccaactacaaaatttaaaacgaccacaataacgttgaaatttatggctcccttagaaagtgacaccatgactgcgcgttcgattctaagcaaagtattagttcgagcaaccaaacaatggcctacagataaagcattcaatagacatttatcacatttatatggcgcctatgtgaatagttttgtttcaaaatttaaagataagcatgttataagcatttcattagagttaattaatgaacgttatttgaaagaccaaacaccattatttgaaaaaggtgtggcattgttaaaagaaattatttggaacccgttagtgactgatcaacaatttgatgaggtttttgtgtcacaagaaaaatctttattaggtaaaaaactagaagcgatggttgataacaaatcgcagatttcatttttaaatttattaaaacatatgtttggagaacatccttatagacatttggctacaggtcaaatagaatgcataaaaagtgtaacgccagaaactttatacgatacatatcaatctatgctacaaaatgattactgtgcagtttacgtcgttggtaacgtagatgaagcacaagttaaaacgcaattgaaaacttatttcgatatcaaacctttccactttgaattaacgcaagacgcacctatgaaacaagcacatacattaccacaagaaattgttgaagtggacgatgtagatcaagctaagttgaatatgggctttagaatgcctgcaaaatatggcgacgcagcgtattttacaatggttgtatttaatgtaatgttcggtggtgacccttcatctgtattatttaatgaagtccgtgaaaaacaaagtttggcatattcaattcattcacaaattgatgcaaaaaatggcttcatgtttgtattgagtggtgtatccatagataaatatgaagttgcaaaagatacaattatcaaagaatttgaaaagttccaaaacggtcaatttgaagaagataagctagcattagctaaaaaagtaattctttcgcagagacaagaatcacatgacagaccaaaaagtatgatagaaattttaaacaacaatatcttattagatgagcccatgtcagaagaaagttattttgaaggtatccaaagtgttacaaaatcagatgtgcaacaattagcgcaagcggttgtgcttgataccatttatattctgacaaaaggaggtaatgactaatgcgagaaaattattatgaacaaatagatgaacgtgtatttgaagcagaattaaataatggattgaaattatttatcatccccaaaaaagggttccaaaaaacatttgtgacgtatactacaaagttcggctcgttagataataaatttaagccacatggtagtgatacttttgtcactgttccagatggtgtagcgcatttcttagaacataaattgtttgaaaacgatgatgatagtgaagatttatttacggcatttgctgaagataatgcacaagtcaatgcattcactagttttgatcgtacaagttatctatttagtgcaacagatcatgtggagcgtaatattaaacgcttattaacaatggttgagtcaccttatttcactaaagaaacagtagataaagaaaaaggcatcatagctgaagaaattaaaatgtaccaagaacagcctggttacaaattaatgtttaatacattgaaagctatgtatgatacacatcctattcgtgtggatattgcaggcagtgtagagagtatttatgagattactaaagatgatctttatttatgttatgagacattttatcatccatcgaatatggtactctttgttgtcggcgatgtagatgtagcaaatatttatgatgtcgtggcaacgcatgaaaatcaacgcgataaagaagcacaaccgcaaatagttagagatccattgatagaaaaagcaactgtaaatgaatccaaagtgactgaaactatgaaattgcaatcacctcgattgatgttaggctttaaaaacaatccgttagttgatgaacccgacgcatcttttgtaaagagagatttagagatgacacttttctatgaaatgttatttggtgaagaaacagatttttatcaatctttacttaacgaagatctaattgatgagacatttggatatcaatttgtattagaaccgacatatagtttctcagtaattacgagcgcaacacagtatcctgataaattaaaagcgttacttttaacagaaattgaaaacaaccaaggacaactgaatgatgaagaagcatttagtttactaaaaaaacaattcataggtgaatttatttcagggttaaattctccggaatacatagcgaaccaatatacgaaattatattttgaaggcgtaagtttattcgatttattggaaattgttgaaagcatcactttagagagtgtaaacgaaacttcaaaaatgtgcttgaacctagagcaagttgttgatagtcgtttggagatgaaataaaaatgaaggcattagtgatgggtggttctggtagtataggtacagctatcgttgatcgtctattgtatgacggttatgaagttatcattcagtataatcaggctaatgttgatacactgcagtcgcaatataaaagtcagcctgtacaattcatacaaatagatttaatgcaggacatcgattttgcggattactttgattttattactaatttggattgccttatttatgcgagtggcactgcattatatggacaaatacaagatatgactgacgaaatgattgatttagcttatcaaattcacgtaaaacaattcatacgtgtttgtaggtattttgttgatcaactaagacaaagtcagagtggtaggattgttgttatttcatctatttggggtgaaacaggtgcaagtatggaatcagtttattctgcaatgaaaggtgcccaaattgcttttgtaaaagcattgagtcaagaacttgcaatgacttcagtaacggtgaacgctattgcacccggtttggtaagtggtaatatggctagagtttggagtgaagcggaattggcagcaattactgaagacttgccacaacaaagattgatagatccgactgaaattgctcacacatgtagttatctatgtcatccttttgcgaaaagtatcaccggaacaattcaaaaagtgaatggcgcttggtacttgtaaataatttaagtaaactatagaaaataaaacaactttgaaacattcaatgatataatgtcagtaagtatgaggaagtaattttctaaaaagttttgtattactatttaacttagatgactgatgaaaggattattatagctaaagtgaagtagcacgtttgtagttcattctagtcgttagttgttcatatgatctaataggatgattcttatatttatgctcagccaataaaacaaaacgtcaatgatataatttataaaataatgtttatttaaagtgtatcatttgctgtttatcataaaagacaacatatggtttataaacaaaggggtgtttatttcatgacagtagcaactaaaaaagaatggtatttagaatatgagataacaatgaaccgagctggccttttaggagatgtttctagtttattaggtttgatgggaattagtattgtgactatcaatggtattgatgaaggtcgtagagggctattaataaagtcagatagtctagataaagtgcatagatttgaaaatatcgtaacagaaatagatgatatatctataacaaaattgcgtaaaccagagttacgtgatcgtttagctgtgagacatggaagatacatagaacaagatgcagatgataaaaaaacgtttcgttttgaaagagatgatttaggtttacttgttgattttatggcagaattatttaaagagaaaggccataaattaattggtattagaggtatgccgagagtaggtaaaactgaatcaatcgttgcaggtagtgtgtgtgcgcacaagagatggttatttatcagttcaacgttaattaaacagactgttcgtagctctttaattaaaggagaatatgattctgatcatgtttatattatcgacggtgcagtcacagcgagagagtctagtcaaaaacatcaagaattagttaaagaagttatgagtttaccagcaataaaagtagtcgaacatcctgacttgttcgttgaaacgagtgattatgaaatgagtgattttgactatatcatcgaattacgagaaaataaaaatcaagaaattcaatatgaagaaatgaaaaagaaaacagttaaaagtaaaaataacttagattttggtgatgatacgtttggtggcggatttggattttttgaataaaatatgaatagttattgaggaggactaacattttgaatttagttggtcaaactttaaaaggacgtcgagaacgtttaggtatgacactaaacgaacttgaaacgcgtacccaaataaaaagagaaacacttacactgattgagaataatgattttgaatcgttgaaaaatgtaaattatgcagaaggttttattaggaaatatgcaaaagcagtgaatatcgactcagtacagttaattgaggcgcatagagaagaaattcctagtaatgatgaatcgcttcaaaatgcaataactgctttttcaaaagaagataaaccgacttatcgaactaaaaataaagaaccattgcaagtggccgttgtaataagtatatttgttattattacagcacttttatggattttttcagtattaattttttaatctgtaagtccaagtacgtcataagttataaatagaaaagaggactttgtatgaatataccgaattggataactgtatttagagttatactcattccaatcttcctattgtttgctctagcgaattttggatttggtaaaatttcatttatcggtggtaatgaaattagaatagaattattaattagtggcattatttttatcgtcgcatcattaagtgactttgtagatggttacttagcgcgtaaatgggaacttgtaacaaacatgggtaaatttttagatccattagcagataaattactagtatcaagtgctttgattgcgctcgtacaagtagatttaaccaattctgtagttgcaattattattattgctcgagaatttgctgttacgggattacgcttattacaaatagaacaaggttttgttagtgctgcaggtcagttaggtaaaataaaaactgctgttactatggttgcccttgtttggattcttttaggcgatccattgtctagctggattggttttgaattaggacaggtattactatatatcggtgtatttttcactatcctatcaggaattgaatatttttataaaggtagagatgtgtttaaggcaaaatcataaacacattaacatcataacgctataaatcggggcatgtagataatttggacatgcttcgatttttttaatttttataaacaagtcgtatagaagcgcttttacatgaacgaatctttcgttatttatggtttttcattttataatatagggaagtagaaatatattgttaattagaagctataaggaataaattatttacaaaaatgtaaatgtctcaggaggaaacgttttgaatatatctattattgcggtaggatcagaattattattaggacaaatcgctaatactaatggtcaatacttatcaaaattatttaatagtgctggccataatgtggttgaacatacagtgattggtgataacccacaaagattagagagagtaattaataaagcattagaaaattatgataccgttatattaactggaggcttgggccctacaaaagatgatttaactaagcatacagttgcgaaagtattagatcgagatttagttatcgatcaaaatgcactcgactacatcgaacaatattttaatgaacaaaacgtcgaaatgacgccaaataaccgtcaacaagcgttagtcattgaaggtgcgcatgtcttggataataaggtcggtatggccccaggaatgcttgtccaacaacatggaaagcaaattgctttgttaccaggtccaccaaaagaaatgaaatcgatggctaaagaggcgtaattaccttatttattaaatggtgaaaaatccaatattttcagaattatttcgcttgcgggtatagggagaatcaaaggtcgaaacagaattaatggattaaatcgatcaacaaacgaaccctacgatagcgccattagctgggtctcacgaagtcaatgtaagattgacagcaagtggtgagacacaacaagtatgtgaaacgttaatagcgccgcttaaagaagaaattttagaacgtatcggtaaatattattatggttctgatgatattgttatagaacaagcatttatgaataatatgacaaaaacatttgccatttatgatggggtgacagatggtatattattttatcggatgaaaaattttgataataatcagttacttcaaggtatgttatctcaccacacgcaatttatagatgaacgtgatataataacatctcaactttcagtatctgctcagattgtcaaagacatgtttaacacggaaataggtatttcagtgatacatcaacatgatacggtatatttaggtattttagaaaatgatgaattagctgtacaatcatttaaaatgacacaaagaagacatttaattaaaagcagaactcaaaattatgtgttgattagattactaaattggtttaaataaatacgaacagtatacagaaaacgcgaaaaatagcacgtgtgttctattttagcattattgaattcaaatattagcgaacaaatattcgcaaaatacttgcgaaattatctgaatcaaggtatagtgaatataagatattttttcgagagataaatctcatttaggaggtccagcattggataacgatcgtcaaaaagctttagatacggtaattaaaaatatggagaaatcatttggtaaaggtgctgttatgaaattaggcgacaacaaagcgcgcaaagtttcgagtgtatcaagtggttctgtaacattagataatgctttaggtgtaggtggttaccctaaaggaagaatcgtagaaatttatggtccagaaagttctggtaaaacaactgtagcgttacatgctatcgctgaagtacaaaaaaatggcggtgttgcagcgttcatagatgctgagcatgcattagatcctgtttacgcagaagctttaggcgtagatatacaaaatttatatttatctcaacctgatcatggggaacaaggtttagaaattgccgaagcatttgttagaagtggcgctgttgatatcgttgtggtcgattcagttgctgcgcttacacctaaagctgaaattgaaggtgaaatgggagatacgcacgttggtttgcaagcacgtcttatgtcccaagccttgagaaagctttccggtgcaatttcaaaatcaaatacaacagcagtatttatcaaccaaatccgtgaaaaagttggtgtgatgttcggtaatcctgaagttacaccaggtggacgtgctttgaaattctatagctctgttcgtttagaagtgcgccgtgcggaacaattgctaataatagcccggcagcaggtaaaatagcgactggtaacattaatgctttaccaatacgctgtagctgtccaaatagctttttaaacatataaaaacatcccttcaaaaatttaaaattttatcaaaaccaccaaaaagcgcacaaaaaaagacatgaacaaacagactatctcagatagtca

SEQ ID NO: 57 - DNA, 1545 bp, Staphylococcus saprophyticus
cttactattacttaaaatgagtgcacatttaatgtgaatttgggtggtaccgcggcgaaagtcgtccctttgtaattaaataatagtttggggtgtttttttattgaataggaggaaaagtagtgaattacagtcataatgaaattgaaaagaaatggcaggactattgggaagcaaataaaacttttaaaacgagcgacaatttagggcaaaagaaattttatgctttagatatgttcccttatccatcaggagcaggcctgcatgttggtcacccagaagggtatactgctacagatatcatctctcgttataaacgtatgttaggttataacgtattacacccaatgggttgggatgcatttggcttaccagctgaacaatatgcattagatacaggtaatgatccacgagagttcactaaagaaaatattcagacctttaagcgtcagataaaagaacttggtttcagttatgactgggatagagaagtgaatacgacagatcctgaatactacaaatggacacaatggattttcatacaattatataataaaggtttagcttatgtagatgaagtggctgtgaattggtgtccagcattaggtacggtattatcgaatgaagaagttattgatggcgtatcagaacgtggcggccatcctgtatatagacgtccaatgaagcaatgggttcttaaaattaccgaatatgcagacagattgttagaagatttagatgaattagactggccagagtcattgaaagatatgcaacgtaactggattggccgttctgaaggtgcatcagtggcatttgatgtgaaagattataatgagcaaattgaagtatttactactagacctgatacaatatacggtgcgtcatttttagtgcttagcccagaacacgagcttgtagatttgattactacggaagataataaagatgatgtagaagcttatcaaaaagaagcggctaagaaatctgatttagaacgtactggcttatcaaaagaaaagtctggtgtattcactggtgcatatgctgttaatccattatcagggcaacaagtaccaatatggattgcagattacgtactatccacttacggtactggtgcggtcatggctgtacctagtggtgatcagcgtgattatgaattcgctaaaacatttgacttaccaattatagaagtcatcgaaggcggagatatgagcaaggaagcctacactggcgacggaccgcatattaattctggtgaactaaacggattatacaatgaagcagctatagaaaaagcgattgaattgttagaaaataaaaatgccggtacgcgtaaagtaaactacaaacttagagattggttgttcagtagacaaagatattggggcgaacctattccagttattcactgggaagatggctcaatgacgacagtacctgaagatgaactaccattacttttaccagaaactgatgaaataaaaccgtcagggacaggtgaatcaccgttagcgaatattgatgaatttgtaaacggtg

SEQ ID NO: 58 - protein, 646 aa, Staphylococcus saprophyticus
VKVEAVSDVNNTEDYGAGQIQVLEGLEAVRKRPGMYIGSTSEKGLHHLVWEIVDNSIDEALAGYADTIEVVIEKDNWIKVTDNGRGIPVGIQEKMGRPAVEVILTVLHAGGKFGGGGYKVSGGLHGVGSSVVNALSEDLEVYVYKDRKVYHQGYKKGVPQFDLKVIEETDDDNTGTVIRFKADSEIFTETTTYHYETLQQRTRELAFLNKGISITLRDERGEEVREDTYHYEGGIKSYVEMLNENKQPLHEEPIYVHQSKDDIEVEIALQYNKGFATNLLTYANNIHTYEGGTHEEGFKRALSRVLNSYGLNSKIIKEDKERLSGEDTREGLTAIVSIKHGDPQFEGQTKTKLGNSEVRQIVDKLFSELFERFLYEHPQVGRIVVEKGIMASHARLAAKKAREVTRRKSALEISSLPGKLADCSSKDPSRSEIFIVEGDSAGGSTKSGRDSETQAILPLRGKILNVEKARLDRILNNNEIRSMITAFGTGIGGEFDLSKARYHKIVLMTDADVDGAHIRTLLLTFFYRFMRPLLEAGYVYIAQPPLFKLTQGKQKYYVFNERELEKLKAELEPTPKWSISRYKGLGEMNADQLWETTMNPENRAMLQVSLDDAIEADQVFEMLMGDVVENRRQFIEDNAVYANLDF

SEQ ID NO: 59 - protein, 900 aa, Staphylococcus saprophyticus
MAELPESRINERNITNEMRESFLDYAMSVIVSRALPDVRDGLKPVHRRILYGLHEQGMTPDKSYKKSARIVGDVMGKYHPHGDSSIYEAMVRMAQDFSYRYPLVDGQGNFGSMDGDGAAAMRYTEARMSKITLELLRDLNKDTIDFIDNYDGNEREPSVLPARFPNLLVNGASGIAVGMATNIPPHNLTEVINGILSLSYNPDITIAELMEDIQGPDFPTAGIILGKSGIRRAFETGRGSIQLRSRAEIEERGGGRQRIVVTEVPYQVNKARMIEKIAELARDKKIDGITDLRDETSLRTGVRVVIDIRKDANASVVLNNLYKQTPLQTSFGVNMIALVNGRPKLISLKDALVEYLEHQKVVVRRRTEYNLKKALDRAHILEGLRIALDHIDEIIRVIRESDNDKIAMASLQEQFKLSERQAQAILDMRLRRLTGLERDKIEAEYNELIAYIEELKSILADEEKLLQIVRDELIDVRERYGDERKTEIQLGGLDDIEDEDLIPEEQIVITLSHNNYIKRLPVSTYRAQHRGGRGVQGMNTLEEDFVSQLVTLSTHDNVLFFTNKGRVYKLKGYEVPELSRQSKGIPVVNAIELDNDESISTMIAVKDLESEEDYLVFATQKGRVKRSALSNFSHINKNGKIAISFKQDDELIAVRLTDGETDILIGTSHASLIRFPETALRPLGRTAAGVKGITLREDDKVVGLDVTKAESDDEILVVTENGYGKRTPVEDYRLSNRGGKGIKTATITERNGNVVCITSVTGEEDLMVVTNSGVIIRIDVEDISQNGRAAQGVRLIKLGENQFVSTVAKVNEEDEAETETEAIASDSENTDATEQMAQDSQQGEAVIEDDAPGNAIHTEVEDSDVSDDDDRQEVRQDFMDRVNEDIDNADNEDNEDNEEE

SEQ ID NO: 60 - protein, 437 aa, Staphylococcus saprophyticus
MTHYHFVGIKGAGMSSLAQIMHDLGNEVQGSDIKNYVFTEVALKNNGIKILPFDANNIQSDMVVVQGNAFPDTHEEVVKAHELKLEVIRYHDFLGHIINQYTSVAVTGAHGKTSTTGLLSHVMNGDKKTSFLIGDGTGLGIPASDYFAFEACEYRRHFLSYHPDYAIMTNIDFDHPDYFKDVDDVFNAFQEMAHNVKKAIIAWGDDTHLRKIEADVPVYYYGFSNKDDVYADNLEISEKGTKFDVYFKGEYFDTFLSPQFGDHNILNALSVITISYLESLNIDNIKEALETFGGVKRRFNETKVGNQVLVDDYAHHPREISATIETARKKYPNKDVIAVFQPHTFSRTQAFLGEFAECLSLADKTFLCEIFGSIRENSGNLTIQDLVQRIDGATLIDEESVNALEQYSDAVILFMGAGDIQKIQRAYMEKIGVTSPF

SEQ ID NO: 61 - protein, 240 aa, Staphylococcus saprophyticus
MAQTSKYERVVLKLSGEALAGDDGFGINPIIIKSIAKQVAEVAKLDCEIAVIVGGGNIWRGKTGSDLGMDRGTADYMGMLATVMNALALQDSLEQLECDTRVLTSIEMKQVAEPYIRRRAIRHLEKNRVVIFAAGIGNPYFSTDTTAALRAAEVEADVILMGKNNVDGVYSADPKVDPNAIKYEHLTHIQMLQEGLQVMDSTASSFCMDNNIPLNVFSITEEGNIKRAVMGEKIGTLITK

SEQ ID NO: 62 - protein, 417 aa, Staphylococcus saprophyticus
MLQIMRCQSGIDQLVTIVGHGADSVKETLGDTSLYSFQEEQLGTAHAVKMASEHLSESQGTTLVVCGDTPLITTATLKSLVEHHENNQAHATVLSATSENPFGYGRILRDSEGRLVSIVEQKDATDAEQQINEISSGIFAFDNQVLFEKLELVKNDNAQSEYYLPDVLSLILEDHGIVEVFHTNDFEEIMGVNDRVMLSEAEKAFRKRINEQHMKNGVTIIDPATTYIGADVRIGEDTVVEPGVKLSGNSVIGEDTVIGQYTEITNSKIGSNVTIKQSVINEAIVDDYATIGPFAQLRPGADLGKKVKVGNFVEVKKSVVKAGAKLPHLSYIGDAEIGERTNVGCGSITVNYDGINKFKTVIGDDSFIGCNTNLVAPITLGNRSFIAAGSTITDNVPEDSLALARARQTTKEGYLKK

SEQ ID NO: 63 - protein, 170 aa, Staphylococcus saprophyticus
LNNKIEPLILIGFMGTGKTTLGQFLASNNQLSYIDLDEHIAIQENKSIPEIFEAIGEQGFRKLENEYLQECVQRYDIISTGGGIIEGDESFRILKEQPKVIWLDCDIEILYKRIKNDSNRPNANNKSLFELKSLYSSRVSRYNEIAFIKVNSSQSLSDLQNDIMEAIVCE

1. An isolated nucleic acid molecule comprising a nucleotide sequence as set forth in FIG. 1, or a fragment thereof.

2. An isolated nucleic acid molecule which encodes a polypeptide sequence selected from the group consisting of those sequences set forth in FIG. 1, or a fragment thereof.

3. An isolated nucleic acid molecule which encodes a naturally occurring allelic variant of a polypeptide selected from the group of amino acid sequences consisting of those sequences set forth in FIG. 1.

4. An isolated nucleic acid molecule comprising a nucleotide sequence which is at least 80% homologous to a nucleotide sequence selected from the group consisting of those sequences set forth in FIG. 1, or a portion thereof.

5. An isolated nucleic acid molecule comprising a fragment of at least 15 nucleotides of a nucleic acid comprising a nucleotide sequence selected from the group consisting of those sequences set forth in FIG. 1.

6. A vector comprising the nucleic acid molecule of claim 1.

7. The vector of claim 6, which is an expression vector.

8. A host cell transfected with the expression vector of claim 7.

9. The host cell of claim 8, wherein said cell is a microorganism.

10. The host cell of claim 8, wherein said cell belongs to the genus Staphylococcus or Escherichia.

11. A method of producing a polypeptide comprising culturing the host cell of claim 8 in an appropriate culture medium to, thereby, produce the polypeptide, or fragment thereof.

12. A method for identifying a compound which modulates the activity of a polypeptide encoded by the nucleic acid of claim 1 comprising:
a) contacting a polypeptide encoded by the nucleic acid of claim 1 with a test compound; and
b) determining the effect of the test compound on the activity of the polypeptide to thereby identify a compound which modulates the activity of the polypeptide.

13. The method of claim 12, wherein said compound is a small molecule.

14. A method for diagnosing the presence or activity of S. saprophyticus in a subject, comprising detecting the presence of one or more of the sequences set forth in FIG. 1, thereby diagnosing the presence or activity of S. saprophyticus in the subject.

15. A vaccine formulation for prophylactic or therapeutic treatment of an S. saprophyticus infection comprising an effective amount of at least one isolated nucleic acid molecule of claim 1.

16. A vaccine formulation for prophylactic or therapeutic treatment of an S. saprophyticus infection comprising an effective amount of at least one S. saprophyticus polypeptide encoded by a nucleic acid of claim 1.

17. A vaccine formulation of claim 15, further comprising a pharmaceutically acceptable carrier.
